United States Patent Application Publication US 2026/0191916 A1 - sequence listing, part 38

SEQ ID NO: 153 - DNA, 2022034 bp, Streptococcus mutans
  source 1..2022034: mol_type = genomic DNA
atgacagaaaatgaacaaattttttggaatagggttttagaacttgcacaaagtcaattaaagcaagcgacatttgattttttcgtttcagatgctaaattattgaaagttgaaggaaatattgcgactatccttcttgatgatatgaaaaaattattttgggaaaaaaatttacagcctgttgttctaacagctggattcgaggtctttaatacagaaatttcaattgagtatgtttttgaagaaactcaatccacatcaaacagcccacaaatttctcagaataaaactgcagaacttgcaacagaaacacttccttttgtgcaaaatgatcttaatccaaaatatagttttgataactttgtgattggtgatgaaaatcgttgggcttttacagcatccgtttctgttgcagaccttcctggaacaacctataatcctctctttatttatggaggacccggtttaggaaagacccaccttctaaatgccattggtaactctgttttagcaagcaatcctaaagctcgtataaaatatatttctgccgaaaattttattaatgaatttgttgtccacattagactacaaaatatggatgagctaaagaagaaatttcgaaatttagatttactattaattgatgatattcaatctttagccaagaaaagtttagctgccactcaagaagaatttttcaacacctttaatgctttacatgataataataagcagattgtccttaccagtgatcgaacaccagatgaccttaacgatcttgagcaacgtttggtaacacgttttaaatgggggttaactgttaacattacacctcctgactttgaaacacgagtagctattttaaacaataaaattcaagaatataattatagttttctctctgaaacaattgaatacttagctggacagttcgactccaacgtccgtgatctagaaggtgccctaaaagatatcagtcttgtggctaattttaaaaaacttgatgttattactgttgaagttgcagcagaagctatcagggcaagaaagcaagatagcagtcctaagatgattgttatccctattgaagatatccaaaaacaggttggaaaattttatggcgtaactgttaaagaaatcaaatcaactaagagaacacaaaacattgttttagcacgccaagttggcatgtatttagcacgtgaaatgacagataacagtcttccaaaaatcggaaaggaatttggagggcgagatcattcaaccgttctacatgcctataataaaatcaaaaatatgttagcacaggatgacagtctaaaaatagaaatggaaacgattaaaaataagataaaataaatcctgtgtataagataaagaaaacgtattatttatccacaagttgtgaacaatctttaagactgatgaaatataagattgttatacttatcctcactatacacaaaacctactaccactactaacttattacttataaaataaaggagttttctatgataaaattttcaattaataaagtttttttcttacaagccttaaatgctaccaagcgagctattagttctaaaaatgctattcctattctttctagtttaaaaattgaagtgaattctcagtccattactttaacaggctctaatggacaaatttctattgaaaatacgatttcagctgaagaagaaaatgctggactattggttacttcttcaggagctatcttacttgaagctaatttctttattaatattgtttcaagcctacctgatatcactttagattttgaagaaattgaacaacatcaagttgttttaaatagtggaaaatcagaaattacacttaaaggtaaagatgtggaacaatatcctcgtttgcaggaagttggaacaaataatcctttaattttagaaacaaatttgttaaaaacaattatttctgagacagcttttgctgctagtacccaagaaagtcgaccaattttaacaggtgttcatttggtattgacaaatcataaagagtttaaagctgttgctacagactctcatcgcatgagtcaaagaaaattaactcttgaccattcatcagatgattttgatgtcgtcattccaagccgttctttacgtgaatttgcaactgtatttacagatgatattgaatctgttgaggtatttttctctaacagtcaaatcctctttagaagtgaatatattagcttctatacgcgcctgttagaaggaaattatcctgatactgatcgcttgttgggcaataactttgaaacagaagttgtcttcaatactaatgctcttcgttatgctatggagcgtgctcatttaatctcaaatgctacccaaaatggtactgttaaattggaaattatcaacaatcaagtaacagcacatgttaattcacctgaggttggaaaagtcaatgaagaacttgatattgaaagcttatcaggaaatgatttaacaataagctttaacccaacttacttgatcgaagctttaaaagctcttaaaagtgagactgtcacaattcgttttatttccccaattcgccctttcactttaacaccgagtgataacagtgaaaacttcattcaattgattacaccagttcgcacaaactaaaatgacgcctattataggcgttgttttttgtcaatatgatataatgacctatatgctctatatttttagtaaatcccaaaaaacaccctaaaaaaacaacattaattaaagaaacttatccacagtttaaggcaaaaattgtataggacaattaactgtttcaaaaatagttatagtataattgatggaaaagtgcttaaactttcaactgaaaagtttagctgctatcaaagaaaaatttatctgtaaaaaggagaatcaatgtacgaattaggatctttagttgaaatgaaaaagccccatgcctgcaccattaagacgacaggtaaaaaagccaattgttgggaggtcgtacgtattggtgctgacatcaaaatcaaatgcaccaactgtgatcatatggtcatgatgagccgccatgattttgaacgtaagataaaaaaggttttataaaagacttatgtagctgaaaaattgttaaatcagtatttttaatagaaaaggtaagtgctggttcagtattattgaattttatattaagcttgttaattgacaagctttttcttatcttttctgctataatattaatgattgaataaaatattggagattttaaatggctttaacagcaggtatcgttggtttgcctaatgttggaaaatcaacgctttttaatgcaataacaaaggcaggagcagaagctgccaactatccttttgcaacgattgatcctaatgtgggtatggttgaagtaccagatatacgtttacagaagttgacagaacttattgtacctaaaaagactgtgccaacaacgtttgagttcacagatattgcaggtattgtcaagggagcgtcaaagggtgaaggtcttggaaataaatttttagccaatattcgtgaagtagatgctattgttcatgttgtacgtgctttcaatgatgaaaatgttatgcgtgaacaaggacgtgaatctgattttgttgatccaatagccgatattgaaaccattaatttagaattaattttggcagatcttgagtctattaataagcgctatgcgcgtgtagaaaaaattgcacgtacgcaaaaagataaggattctgtagccgagtttaacattcttcaaaagataaaacctgttcttgaagatggaaagtcagcacgtaccattgattttacagaagatgaagcaaaaattgtcaaaggcttgttcttattgacaactaaaccagtgctttatgtagccaatgttgatgaagataaagtagctgatccagatagtattgattatgttcaacaaattcgtgaatttgcagcaacggaaaatgctgaagttgttgttatttcagcgcgtgctgaagaagaaatttctgaacttgatgatgaagatagagcagagtttttagaagcaatgggcttaaatgaatcaggcgttgataaattgacacgggcagcttatcatttgttgggtcttggaacttactttacagctggtgaaaaagaagtgcgtgcttggacctttaaacgtggaatcaaagcaccacaagctgcaggaattatccattcagattttgaaagaggcttcatccgtgctgtaaccatgtcttatgatgatcttataaaatatggctctgaaaaagctgtaaaagaagcaggtcgcctacgtgaagaaggtaaagattatattgttcaagatggtgatattatggaattccgatttaatgtttaaggaaattaaagaacaataacaaaaaagaggctgggacaaaagttcgggcttcttaatctttacaaattcattttggaaaggaaatcatgactaaattaattgttggccttggaaatccaggcagtaaataccatgaaacgaaacataatgttggctttatggctcttgacagaattgtcaagcctttgaatgttcagtttacagaaaataaaacatttaaagcagaaacagtagcgacttttattaatggtgaaaaaatttattttattaaaccaactacatttatgaatgccagtggtttagctgtcagagcttttctagcttattataatttaactgtggaagatctaattgttatttatgatgatcttgatatggaagtaggaaaaatacgttttcgtcaaaaaggctctgctggtggacataatggtataaaaagcattatcaaggaaattgggactcaggaatttgatcgtatcaagattggtattggccgtccaaaggataagatgacagtcgttaactatgttttaggaaaatttgataaagaagatgaaataactatttttaacacacttgataaagttgacaaagctgtcaattactatttacaaacgaaaaattttgaacaaacaatgcaaaaatttaatgggtaagatgaatttaatagatttatttaaacaaaatcaaaaaattaaagagtggacagaacatctctctgctcctactagacaattagtaatgggattttcaagctctagtaaagctttggcaatagcagctgcttataagcagcaaaagggaaagatagtaattgtgacgtcaactcaaaatgaggctgaaaaacttgcaactgatttaattagcttaattggtgaggaagaagtttatcaatttttcgctgatgatgttgcagcagcagagtttatttttgcatcgcaagataaaacaaattctcgtgtagaaagccttaattttcttttagataaagaaaaatcaggaattttaatgacaagtattgttggtataaggattttacttccaagtccccaaaattaccaagcagctcaatttaaattaaaagttggtgaagaatataatcttgacaatattatcaagcaactgtcaaatattggttatcaaaaagtagcacaagtttataatcctggagaatttagtaaaagaggggatattttagatatttatgaaatcaatcagccctatccttatcgtcttgaattttttggagatgaaatagacggcattcgcacttttgatcctgatgatcaaaaatcccttagtaatctggattcttttattttgatcccatctgatgatatcattctaacagatagtgattttgatcaagcctgttataatttagaaaaagcacttattactgcaaatgatagtttacaaccttatttaaaagaggttttatctgttacgaaagatcattaccgtcatcaagatgttagaaagtttttatcctttttctatcaaaaagaatggactcttttaaattatctacctgaacaaacaccactatttttcgatgattttcaaagaattattgatcagaatagtcgttttgatttggatattgctaatcttttgacagaagatttacaaaatagtaaagcagtgtcaagtttatcttattttgctaataattacaaagatttaagacactatcaacctgcgacctttttttctaattttcataaaggcttaggaaatcttaaatttgattatctctataactttacacagtatccaatgcaggaattttttaatcaatttcctttattaattgatgaaattagacgttatcaaaaatctgagatgactgttcttttacaaacagattcacagcagagtcaaggacgtttacaaaaagctttacagggatataatttcaatttaccaattagtcaagttgataatctgttaaaaaagcaagctcagttaacaattggaaatctttcaactggtttttattttgctgatgaaaagcttgtcttaatcactgaaagagaaatttttcataaaaaagtaaagcataaacgtcgtcgttcatatattagtaatgctgagcgtcttaaggattacaatgaattagaaaagggagactatgttgttcataatgtgcatggcataggacgttttttagggattgaaacgattgaagtgtcaggtgttcaccgagattatttaaccattcaatatcaaaatgctgatcgtatttccattcctattgaacaaattgaactcctttcaaaatatgttgctagtgatggtaaagagccaaagatcaataagcttaatgatggccgttttcaaaggattaaacaaaaggtatcaaaacaagttgaagatattgctgatgatcttttaaaactttatgctgaacgcagtcaattaaaaggttttgctttttctcctgatgataaaaatcaggaagaatttgataatgattttgcttatgttgaaactgaagatcaattaagatccattaaagaagtcaaaaaggatatggaaaaagaccaaccaatggatcgtcttcttgttggtgatgttggttttggaaaaacggaagtagcgatgagagctgcttttaaagcagttaatgatgataaacaagttgctgttttggtgccaacaacagttcttgctcaacagcactataatacttttaaggagcgctttgaaaattttcctatcaatgttgccatgatgagtcgttttaaaaccaagactgaacagtctgaaacgttaactaaattagctaagggacaggttgatatcattattggaacacatcgtctactttctaaagatgttacgtttaaagatcttggtttgcttgttattgatgaagagcaacgattcggggttaaacacaaggaaacattgaaagaattaaaaactaaggttgatgtcttgaccttgacagcaactcctattccacggacattacatatgtctatgcttggtatacgagatttatcagttattgaaacacctccaagtaatcgttaccctgtccagacttatgttatggaaacaaatgcaagtgtcattcgtgaagctattatgcgtgaaattgatcgaggtggacaaatcttttatatttacaacagggttgacacaattgacaaaaaagttgctgaactaagagaattgattccagaagccaacattggttttgttcatggaaaaatgagcgaaattcaacttgaaaatactttactagactttatcagtggtgaatacgatctcctagtaactacaacaatcattgaaacaggtattgatatttcaaatgttaatactctgtttattgaaaatgctgattacatgggcttgtcaactttgtatcaacttcggggacgtgttggtcgatcaaatcgtattgcttatgcttatcttatgtatcatcctgataagattttaacagaagtgtcagaaaaacgtttggaagctattaaagggtttacagaacttggttcaggttttaaaattgctatgagagatttgtctattcgtggtgcaggaaatattcttggttcctctcaaagtggcttcattgattctgtaggttttgaaatgtattcacagttattagaagaagcaattgcagcaaaacaaggtcaaagaaaaacgcgttctaagggaaatgctgaaattaatttacaaattgatgcttatttaccaacggattatattagtgatgagcgtcagaaaattgaaatttataaacgtattcgagaaattgaaagtaaaacagactatcaggctttacaagatgaactgattgatcgttttggtgattatccagatcaggttgcttatctgatagaaatcggtcttttaaaagcttatctagatgatgcctttgtagaatcacttgatcgtaagcaaaattcagtagtagtgtgttttgaaaagatttcattaaaattttgtctaactcaggattattttgaagctttgtctaaaactaatttaaaagctcgtattagtgaaaataaaggaaaaattgaaattgtttttgatgtgcgagctaaaaaggaatatgaaattttagaagaattaattaaatttggaaaaattttgaagaaactaaaagataagaaaaagtaacaatttattaaattacttttgaactttctaactgagtagaggaaacttatttgttgtgatatttactattgtttctatctttttataaagaaaaatgataaaataaaaaggataaactggggtaattaaatgagattagataaatatttaaaggtatcacgtattattaaacgtcggtctgtggctaaggaagtttctgataaaggacgaattaaagtaaatggcattctggctaaaagttcaacagacttaaaaataaatgacaccattgaaatacgttttggtaataaattattgactgttcgtgttttagaaatgaaagatagcaccaaaaaagaagatgctgtaaaaatgtatgaaataataagtgagacgaggattgacttaaatggagaaacctaacattgttcagcttaataacaaatacattaatgatgaaaaaactaaaaaacgttatgaagaagaagaaaccaaacgtcgccaccgttttattgggtggattttgatttttattattttattatttattttaccggcctataaccttgtagctagttatatgaatttgcaaagtaaaaaagaacaaattgtaaaactacaaaatcaacagaaaagattagatgctaaaacagatgctgagaaaaaatttgctgatcgtttaaaagatgataattatgttgagaagtatgcacgtgctaaatattattattcaatagatggtgaaaatatttaccctgctccaaatttattacctaaataatgaaaaatttaattgaaacagttgagaaatttttaacttattctgatgaaaaattagaagaattagccaaaaagaatcaagctttacgagaagaaacatctcgtcaaaaatcaaaataggaggaaaaaatgaaaaagctattagccataatgttaatgtttgttttttctactcctatttttgttattagcacagaaaaaaagcctatagcattttttgataaaataccaaccaatccgaatctctatcatgacgtttccagcttttcaactgctgatttaactggtaaggttcaaaaaataaaacttggttctaaatttaaaattaggtctcttattaccaataaggcaaaaacaccagtctttaagctatccaatggtcgtttcattagggcaagtcatgataatgtttatgaagatattgttcttcgacgagaaaatgttaagggaagctactggttaaaaaagacatttaccgtttatcaaacaccttatgttgcaggaacaaaaatagctaataccaaactaacgaattataacaaggtacatatttcccaaaaagctattactaagcacggtatctatttaaaagctgacggccagggttggattaatgaaaaggatttaactgttcaagataaccgaatggaaaaggtacaagctttactgactagaaagtataataaacccaattattctatttatgtaaaacagttaaaaacgcgaaaaacagctggaataaatgaagataaatcaatgtattctgctagtgtaactaaattgccaattctatattttattgaaaaacagataaaggatagtagggttaaactaactgataagtttaagtatattgaacaagttaaccagtttaaaggagcttataaggtagaaggtagtggtgaaatgcctaaaaaagctgacaataaatactatactgttgatagtcttttaaaagctgttgctcagcattcagataatgttgctagtaatattttaggttactatattgcccatcagtacgataaaacttatcaaaaaacggttttaagggttgcagatgttaagtggaacatggaaagccgtaatgtttcctctaaaacagcagcaaatgttatggaagcactttattcccaaaagtgtcctgttataagctacttaacttcaacagaatttgataatacacgcatttcacgtgatattgcagttcctgtagctcataaaattggagatgcttacgattataagcatgatgttgctattatttatgctgaccaaccttttatcttatcagtttttacagataaatcatcttatgaagacatatcagctatagctgatgatgtctatggtattttaaaatgacttatgaaaaagtgttaaagtatgttcaagagaaaaaattttttgagacgcattataacattctaatagctgtatcaggtggggtagattcgatgaatttgctgcactttttgcatatttaccagaaaaaactgcaaattagaatagctatagctcatgtgaatcacaaacagagaccacaagctgatgaagaagaaatttatcttaaaaattgggcacgagacaatcatattcctttttatactgctgtttttaagggaattttttcagaaaaaaaggcgcgtgattttcgttatacttttttcaaaaatataatgaaagagcatggatatacagctcttgttacggctcatcatgctaatgatcaggctgagacagtctttttacgtttactcagaggatcacgcttacgatatttgactggtattaaagaaattcaggagtttggcaatggccaactgattcgtccttttttaaaatttcacaagaaggaactaccaaatattttccattttgatgatgattcaaatcaaggaaattcttatcttagaaatagaatcagaaatcattacttgcctattttgacacaggaaaatcctaaattaagtcagcatttaatccaaatgagtgaagaaacaaatctccttttcaaggctttttcagatttaacctcgcaattagatattcaagattgtcaaatttttagaagtcaaagtgaggcaatacagtactttttattgcagaactatctaagaaaatttccaaatttagaagtcagcaaagctcaatttgataatttgcttcatattctgaaaacaaaagattattactatgattatttaaaaaataattactatttgaaaaaagacaaaaaaaggttcaaaatttgtaaaataggtcctgagacggatagatttgaaggcgaaaaagtattagaatatggcagtatggtcaaatatggtcagtacattttctcttttcaagagggttcagattcaaaaaaaggaatccctgtaaaaaatgattttcctattattataagacgtcgtaagtctggggacaaaatcaaattaggaagtcattctaaaaaattgcgacgtttatttatagatgaaaaaattcctatttttaaacgttcaaatgctattattgttgaacaagatagcgatattatattaattcttttagatggagttacttatttgagaaaaggttttaaagatgatataatgaaaggcagactgtatattcaaaatagaaattggtgagaaatgcttgaacagaatattaagaaagttctctattctgaagaggaaatcattgttaaaacaaaagaattaggtgctcagttaaccaaagattatgctggtaaaaatccgcttttagtgggtgttttaaaaggttctgtcccttttatggctgagttaatgaaacatattgatactcatattgagattgatttcatggtcgtatcaagttaccatggcggaaccacgagtagtggtgaagtgaagattttaaaagatgttgatactaacattgaaaatcgcgatgttatttttattgaagacattattgatacaggccgaaccttgaaatatctacgtgatatgttcaagtatcgtcaagcaaattctgtgaggattgccacattatttgacaaaccagaaggtcgtgttgttgatattgacgcggattatgtttgttataaagtgcctaatgaatttattgttggttttggattagattatgctgaaaactatcgtaatcttccttatgtaggagtcttaaaagaagacgtttattcaaaataagaaaaaggttttaattaatatatgaaaaataatcgaaataatggatttgttagaaattctcttgtttatatcatattgattttagctattgtgacaggttttcaatatttttttagaggaacaggttcacaaagtgaaaaaattagttatacaactctcgttaaacgcgtcaaatcgggtgatataaaatcaattacttaccaaccaagtggcagtatcgtccaagtaacaggtgattacacaaagtctcgggaaattaaaactaacagtgacttagcttttttcaacgggacaacaacaaaagttaaaaagtttacctcaattgtccttcctaatagtacttctattgaaaaaattgaaaaattagcagaagataaaggaactaaaatttctgttaaacaagagagttcaagcggagcttggatctccttcttaatgagcttcttgccaattctcataatgatcttcttcttcactatgatgttaaatcaaagtggcggcggtgcccgtggtgccatgagttttggtaaaaataaagctcgttcttcttctaaaagtgatgttaaggttcgattctcagatgtcgctggtgcagaagaagaaaaacaagaacttattgaagttgttgattttctaaaagatcctaaacgttataaggctttaggtgctcgtattccagccggtgttctgcttgaaggccctccaggaacaggaaaaacacttcttgctaaagcagtagccggtgaagctggtgttccgttcttctctatttctggttctgactttgttgaaatgtttgttggggttggtgctagccgcgttcgttcattatttgaagatgctaagaaagcagagcgtgccattatctttattgatgaaattgatgcggtcggtcgtcgccgtggcgctggtatgggcggcggaaatgatgaacgcgaacaaacacttaaccaactgttgattgaaatggatggttttgaaggtaatgaaaatattattgttattgcagcaaccaaccgtagtgatgtcttggatccagcccttcttcgtccaggtcgttttgaccgtaaagttcttgttggtcaaccagatgttaaaggtcgtgaagcgattttacgtgttcatgctaaaaacaaacctctagctagtgatgttaatctaaaagttgttgcgcaacaaacaccaggttttgtaggtgctgatttagaaaatgttctgaatgaagctgctcttgttgctgcccgtcgcagtaaaaaaattattgatgccagtgatattgatgaagcagaagatcgcgttattgcaggcccgtctaagaaagataagactgtttctgaacatgaacgtcagatgattgcctaccacgaagctggacataccattgtaggacttgttttatcgaatgcacgagttgttcataaagttaccattgttcctcgtggtcgagctggcggttacatgattgctcttccaaaagaagatcaaaatctcttatcaaaaagtgatttgaaggaacagttagccggactgatgggaggacgtgtcgcagaagaaattatcttcaatgctcaaacaacaggtgcttcaaatgactttgaacaagccactcaattggcacgatcaatggtaacagaatatggtatgagtgaaaagctcggtccagttcaatatgaaggtaatcattcaatgatgccaggacaatttgcatcagaaaagacttattcagcacaaacagcccttcttattgatgaagaagttcgtgaacttcttaatgaagctcgcaataaggcagctggaattatcaatgataatcgtgaaacacataaattaattgcagaagcgcttcttaaatatgaaactttggatgcagcgcaaattaaatctatttatgagactggtaagatgcctgaaaaatcagaggattcaaaggatgcacatgcgctttcttatgatgaaataaaagaaaaaatgtctgaagataatactgattaatggggcttgttaaaaaccaaccaataaggattggaataggaatattagagcttatcaaacactcagcttaatatttattaaccatagagggttaccattcattaattggcataactaacaatataataaggggatttggttttataatagtacaaaaccaaatcccctttaattttgttgtaatttatctgatgttatagaaagataaaactttaggattctaggagagttctttttttgccacaatccgcgcccgtgtttaattaagatttgaaattttaaactcaaatattccgaatggtagaaagtttcattcaaggtttgagtcgctcgccaatgccaataaaagaaataatcttgaatttgcagggtttaaaaaagtttatctacattttacacaatttcccaactgttttttgccgtttaaatttacagaggtctactgactatggtaaactaataaggctgttaataaagttaggagaaatgatgactattttcagaaagaagaatactaatttagataaaacagaaatgaaacgtcactttaaagtaattgatctaatttttcttggattaggatcaatggttggaacaggaatttttacaattactggtattggtgcagctaagtatgcgggtcctgctttgattatttcaattattgtttcggcaattgccgttggaatttctgcacttttctatgctgaatttacttctcgaatacctgcaaatggtggagcttacagctacttatatgctactttgggagaatttcccgcttggttagctggttggtacattattatggaatttcttactgcaatttcaagtgtagcatctggttggggaagttatttcaagggattgttatcaagctatggtattgaattaccatctttgcttaatggtacttttaatccagctaaaaataattacattgacttgcttcctgccttagtcatttttttagtcacaggaatcgtgttattaaattctaaaattgccttacgctttaatagtagtttagttgtaatgaaattttctgccttagccctttttataattattggattgttttatataaaacctgaaaattggtctaattttgcaccttttggttttggaaaaatttatggtggacaaactggaataatggctggcgcttctttgatgttttttgcatttttgggatttgaatctatttcaatggcagtggatgaagttcaaaaaccacaaaaaaatattcccaaaggtattattgcttctttaacgattgttaccattctttatgttagtgttactcttgtattaactggtattgttcattattctaaattaaatgttgccgatgcagttgcctttgcacttcgtcaagcgggtttggtatgggcagcaaactatatttcagttgttgcgattctgactcttataacagtttgcatttctatgacttttgctttagctagaaccgtttatagtattagtcgtgatggattattgccaaaacaactcggcattgttaccaaacatagcaaggttccgaaaaatgctactcttcttgttggttttgcttctatgatttgtgctggagtttttccgctttctagcattgcagaatttttaaatatttgtaccctagcttatcttattatgttggccattgctattatcaagctcagaaaagatcagggacaacctaaaattggagaattcaaaacaccatttatcccatttttacccattgtttctatagttatatgcttatctcttatgagtcaatataagtctgtcacttggattgcatttggaatcagtacatctatagctttcttaatttactttgcatatggttatagacattcaactattttcataaaaaataatccaaaaattagatagaccttttggtaaatagtcataggtaatgccgagttttctgctagatttggtattatttttaaccaaaaatgaaaccttgtctatctctttaccaaatgatctcagttaaaacagaaaaaaagcgagaaaagctattgacaaaggggggaagagctggtagaataaagaagttgtctcagaaagaggcagagccctttgaaaactgaacaagaagacgaaccaaccaaagtgcagggtgacataaagaaatgtgacctgtcaaagaacgaaaaaaaactgtcagagtgcagaaatgagtgaagactcaagcttttaatgagagtttgatcctggctcaggacgaacgctggcggcgtgcctaatacatgcaagtgggacgcaagggaacacactgtgcttgcacaccgtgttttcttgagtcgcgaacgggtgagtaacgcgtaggtaacctgcctattagcgggggataactattggaaacgatagctaataccgcataatattaattattgcatgataattgattgaaagatgcaagcgcatcactagtagatggacctgcgttgtattagctagttggtaaggtaagagcttaccaaggcgacgatacatagccgacctgagagggtgatcggccacactgggactgagacacggcccagactcctacgggaggcagcagtagggaatcttcggcaatggacgaaagtctgaccgagcaacgccgcgtgagtgaagaaggttttcggatcgtaaagctctgttgtaagtcaagaacgtgtgtgagagtggaaagttcacacagtgacggtagcttaccagaaagggacggctaactacgtgccagcagccgcggtaatacgtaggtcccgagcgttgtccggatttattgggcgtaaagggagcgcaggcggtcaggaaagtctggagtaaaaggctatggctcaaccatagtgtgctctggaaactgtctgacttgagtgcagaaggggagagtggaattccatgtgtagcggtgaaatgcgtagatatatggaggaacaccagtggcgaaagcggctctctggtctgtcactgacgctgaggctcgaaagcgtgggtagcgaacaggattagataccctggtagtccacgccgtaaacgatgagtgctaggtgttaggccctttccggggcttagtgccggagctaacgcaataagcactccgcctggggagtacgaccgcaaggttgaaactcaaaggaattgacgggggcccgcacaagcggtggagcatgtggtttaattcgaagcaacgcgaagaaccttaccaggtcttgacatcccgatgctattcttagagataggaagttacttcggtacatcggagacaggtggtgcatggttgtcgtcagctcgtgtcgtgagatgttgggttaagtcccgcaacgagcgcaacccttattgttagttgccatcattaagttgggcactctagcgagactgccggtaataaaccggaggaaggtggggatgacgtcaaatcatcatgccccttatgacctgggctacacacgtgctacaatggtcggtacaacgagttgcgagccggtgacggcaagctaatctctgaaagccgatctcagttcggattggaggctgcaactcgcctccatgaagtcggaatcgctagtaatcgcggatcagcacgccgcggtgaatacgttcccgggccttgtacacaccgcccgtcacaccacgagagtttgtaacacccgaagtcggtgaggtaaccttttaggggccagccgcctaaggtgggatggatgattggggtgaagtcgtaacaaggtagccgtatcggaaggtgcggctggatcacctcctttctaaggaaaaacgcaaagcacattaggggaacttcttgtttagttttgagagggtaagtggggccttagctcagctgggagagcgcctgctttgcacgcaggaggtcagcggttcgatcccgctaggctccattaaaacaggatactaacagacggttcgcttgcgaatacttctgtagaagattatctaattttctacagaagtcagtctggagttcaacttcatatcttgtttaagacaaggaagtctataaaatccacttaggatatgttaagtatcctagagatggttcattgacaattgaatagctagtaaaagccctatagcgcagctatagggaaacaaaaaagaaaccgagacgctgaaaagccagagaaacgagaaataaggttaagttaataagggcgcacggtggatgcctaggcactaggagccgatgaaggacgtgacgaacgacgacatgctttggggagctgtaagtaagccttgatccagagatatccgaatgggggaacccaacaggtaatgcctgttatccataactgttaaggttatgagaaggaagacgcagtgaactgaaacatctcagtagctgcaggaagagaaagcaagagcgattgcctcagtagcggcgagcgaagaggcaggagggcaaaccagagtgtttacactctggggttgtaggactgcgataaagcagccaagggaatagaagaagactctgggaagagtcgccagagagagtaagagcctcgtatttgaaattcacttgatgccaagcaggatcctgagtacggcgggacacgaggaatcccgtcggaatctgggaggcccatctcccaaccctaaatactccctagtgaccgatagtgaaccagtaccgtgagggaaaggtgaaaagcaccccggaaggggagtgaaagagaacctgaaaccgtgtgcttacaagaagttcgagcccgttaatgggtgagagcgtgccttttgtagaatgaaccggcgagttacgtttacgtgcgaggttaagttgaagagacggagccgtagggaaaccgagtctgaaaagggcggttaagtacgtagatgtagacccgaaaccaagtgacctacccatgagcaggttgaaggtgcggtaaaacgcactggaggaccgaaccaggacacgttgaaaagtgtttggatgacttgtgggtagcggagaaattccaaacgaacttggagatagctggttctctccgaaatagctttagggctagcgtcggtcgcgagactcttggaggtagagcactgtttgattgaggggtccatcccggattaccaatctcagataaactccgaatgccaacgagttaagaccggcagtcagactgcgagtgctaagatccgtagtcgaaagggaaacagcccagaccaccagctaaggtccccaaataattgttaagtggaaaaggatgtggggttgcacagacaactaggatgttagcttagaagcagctattcattcaaagagtgcgtaatagctcactagtcgagtgaccctgcgccgaaaatgtaccggggctgaaacaatttaccgaagctgtggatcccttaggggatggtaggagagcgttctatgtgcgcagaaggtgtaccgcaaggagcgctggagtgcatagaagtgagaatgccggtatgagtagcgtaagacaggtgagaatcctgtccaccgtaagactaaggattccaggggaaggctcgtccgccctgggttagtcgggacctaaggagagaccgataggtgtatccgatgggcaacaggttgatattcctgtactagagtattgagtgaaggagggacgcagcaggctaactagagcgtgcgattggaagagcacgtccaagcagtgaggtgaggactgagtcaaatgcttagttctgcgccaccaagctgtgacggggagcgaagtttagtagcgaagctagtgatgtcactctgccaagaaaagcttctagcgttaatgaatactctacccgtaccgcaaaccgacacaggtagtcgaggcgagtagcctcaggtgagcgagcgaactctcgttaaggaactcggcaaaatggccccgtaacttcgggagaaggggcgctggcgataagtcagccgcagtgaaaaggcccaagcaactgtttatcaaaaacacagctctctgcgaaatcgcaagatgaagtatagggggtgacgcctgcccggtgctggaaggttaagaggagcgcttagacgtttgtcgaaggtgtgaattgaagccccagtaaacggcggccgtaactataacggtcctaaggtagcgaaattccttgtcgggtaagttccgacccgcacgaaaggcgtaatgatttgggcactgtctcaacgagagactcggtgaaattttagtacctgtgaagatgcaggttacccgcgacaggacggaaagaccccatggagctttactgcagtttgatattgcgtatctgttacacatgtacaggataggtaggagccaaggaagagtgaacgctagtttacttggaggcgatgttgggatactacccttgtgtgatggctactctaacccggtaggttgatcatctacggagacagtgtctgacgggcagtttgactggggcggtcgcctcctaaagcgtaacggaggcgcccaaaggttccctcagactggttggaaatcagtcgcagagtgtaaaggtataagggagcttgactgcgagacagacaagtcgagcagggacgaaagtcgggcttagtgatccggtggtaccgtatggaagggccatcgctcaacggataaaagctaccctggggataacaggcttatctcccccaagagttcacatcgacggggaggtttggcacctcgatgtcggctcgtcgcatcctggggctgtagtcggtcccaagggttgggctgttcgcccattaaagcggcacgcgagctgggttcagaacgtcgtgagacagttcggtccctatccgtcgcgggcgaaggaaatttgagaggatctgctcctagtacgagaggaccagagtggacttaccgctggtgtaccagttgttctgccaagagcatcgctgggtagctaagtagggaggggataaacgctgaaagcatctaagtgtgaagcccccctcaagatgagatttcccataacgttcagttagtaagagccctgagagaagaacaggtagataggttgggagtggaagcgttgtgagacgtgaagcggaccaatactaatcgctcgaggacttatccaaaaataagtgactaagggcgtaaaatccgcctgaaaaataggaaatgggtgcagtgtttgatgaacaccagaccatttctcttttttccaaggatttagcccgagtaccattttttaaagaaagcaggcgcagcgtcggtttcagtggctagctattcaatcgtgagtgagcgatcacgcttgttaagtgatgatagcctaggggagacacctgtacccatgccgaacacagcagttaagccctagcacgcctgaagtagttgggggttgccccctgtgagatagggtcgtcgcttagcaagagggagtttagctcagttgggagagcatctgccttacaagcagagggtcagcggttcgagcccgttaactcccataactaagtaactaaagtgattagttagaggtcccgtggtgtagcggttatcacgtcgccctgtcacggcgaagatcgcgggttcgattcccgtcgggaccgtctttttctgaaaagagagggatcatcgactcgttagctcagttggtagagcatttgacttttaatcaaagggtcactggttcgagcccagtacgggtcatcaagagatgcgggtgtggcggaattggcagacgcaccagatttaggatctggcgcttaagggcgtgggggttcaagtcccttcacccgcatatagaggagataggccggcttagctcagttggtagagcatctgatttgtaatcagagggtcgcgtgttcaagtcatgtagccggcattgcgaacgtagttcagtggtagaacatcaccttgccaaggtgggggtcgcgggttcgaatcccgtcgttcgctttaggaggccggggtggcggaactggcagacgcacaggacttaaaatcctgcgaaggggaaccttcgtaccggttcgattccggtcctcggcataaataaagaaggagcacccttggctcaactggatagagtacctgactacgaatcaggcggttgcaggttcgaatcctgcagggtgcatgagtggggttagtaaaggactagcacactttaatgatgaggagaggttttacgggaagtagctcagcttggtagagtacttggtttgggaccaaggggtcgcaggttcgaatcctgtcttcccgattattggcggtgtagctcagctggctagagcgtccggttcatacccgggaggtcgggggttcgatccccttcgccgctataaattaattatgtgggtgttttggacctttagctcagctggttagagcactcggctcataaccgagcggtcgtaggttcgagtcctacaaggtccatattatatctctgcggaggattacccaagtccggctgaagggaacggtcttgaaaaccgtcaggcgtgtaaaagcgtgcgtgggttcgaatcccacatcctcctttatagacatatcgcgggatggagcagttaggtagctcgtcgggctcataacccgaaggtcgtaggttcaaatcctgctcccgcaataagaggaaggctcggtagctcagttggtagagcaatggattgaagctccatgtgtcggcggttcgattccgtctcgcgccatttttagcgggtgtagtttagtggtaaaactacagccttccaagctgttgtcgcgagttcgattctcgtcacccgcttttcttttataaaagataaaccaagcataggcttgggcgcgtagctcagctggttagagcgcacgcctgataagcgtgaggtcggtggttcgagtccactcgtgcccatatatatttggagaattactcaagaggctgaagaggacggtttgctaaatcgttaggtcgggaaaccggcgcgggggttcgaatcccccattctccgtagtgaacgagattatctattgatatctcgttttaattatacgtttgtgtgcgggtgggatgagatgaaaaaaatgagattgtcacgttttattgtttttgttatcacggtattattaacaatttcaataggacttttttttattttccaagattctgttattataaaatcggtatcaaagcctgttaatttagttgtttctagcgctgatgagatcgtacattggccttttcaagtaattgataatactaagcatttgtttaaaactaattcagaaaataaaacattaaagcgtaagttagaaaaatttgaggggcaaaaaggtgatttagagagattaaaagaagaaaacacagcacttcgtaagactttaaaaataaaagaaaatttccctgatctaactgttttgtcatctaaagtcattgttcgttccccggtttcttggttagatatattaactatagatttaggaaaaaatgatggggtgacaaaaaatatgttagtcctttcaaatggtaatttagtggggaaaattactcaagttactgctacctctagttctgtaaaactgctttccaatactaaaagcattgatgaaattccagtcaaaattgcaacccaaaagggggatgtttttggcattttaacacattatgatcctaaaaccagtacttttgaaattactcaattaacctcctccttagatgttaagaaaggggatagtgttacaacaagtggcttagatggacaaagtgttgaaggtgtgtctgttggtaaggttgtatctgaagaaaataattcaaacaatctttctcggaaaattttcgttaaaccagcggtagatttatctgatatctcccatgtaactttagtaggtgattaatatgtctatctttaaaaataaattatttgtcattttatttgcctttcttatgttacttgtagatgggcatttatctttattatcacgaatcttatttcaaaatcagtttattgtgtcaagtcattttttattcattgtgttattgttttatactcttgtattcaatccttattttatttttggacttgcctgtgttttaggaattatttatgatttttattatttaggggtatataatttgggaattgcaactatgttgtatcctttaacaattgttattatgtttaaattatggaaacatattccaaatggtcctgttcaacgctttctagttttttttatcctaatcttttttcttgattttgctagtattggtatggcctatttatatcaattgacagcttatcctttaaatgattttatcacttataatttagcaccttccttaatttttaatatactggcttttctcttctttcaaaaacttttagaaaggatttacctatgaaaggcgatgttaaagcattttaaataaaaatgtaataatgacgtaatatatgaaaaggttttttttgatataattataaagtcttatcgaaaaaggagttatatttgtaatgaaaaaaagaattttatcagcagttttagtgagtggtgtaactcttagttctgcgacaacattatcagctgtaaaagctgatgactttgatgcgcagattgcgtcacaagattctaaaatcaacaacttgaccgcacaacagcaagcagcacaagcacaagttaatacgattcaaggacaagtaagtgctttacagacacaacaagctgaattacaagctgaaaatcaaagacttgaagctcagtctgctactttgggtcaacaaattcaaacactttcaagcaaaattgttgcacgtaatgaatctttgaagcaacaagctcgtagtgctcaaaaaagtaacgcagctaccagctatattaatgctatcattaattcaaaatcagtttctgatgctattaatcgtgtttcggctattcgtgaagttgtatctgctaatgaaaaaatgcttcaacaacaagagcaagataaagcagctgttgagcaaaagcaacaagaaaatcaagcagcaattaatactgttgcagctaatcaggagacaattgctcaaaatacaaatgctttaaatacacagcaagctcaattagaagcagcacaactaaacttgcaagctgaattgactactgcacaagatcaaaaagctactttagttgctcaaaaagcggcagcagaggaagctgcacgccaagcagcagcagcacaagcggcagcagaagctaaggccgcagcagaagcaaaagctttacaagaacaagcagcgcaagcacaggcagcagcaaataataatactcaagctacagatgcttctgaccaacaagcagcggcagctgataacactcaagcagcacaaacaggtgattcaactgagcagtcagcagcgcaagcagtaaataattctgatcaagaaagtactacagcaacagaagcgcaaccatcagcttctagtgcttcgacagcggctgtagcagctaatacttcttctgctaatacatatccagcagggcaatgtacttggggtgttaaatcattagctccttgggtaggaaactactggggtaatggtggacaatgggcagcaagtgcagcagcggcaggatatagagttggttctacaccttcagctggagctgtagctgtatggaatgatggcggttatggacacgttgcttatgttacaggtgttcaaggtggccaaattcaagttcaagaagctaactatgcaggtaaccaatctattggtaactaccgtggttggtttaatccaggtagtgtaagctatatctatccaaactaatttaatattataaaaaggtaagatttatcttatctttttatttttccttatattcatcataattggattgaaaaattattctaaaaacgttaaaatgaaagaggattaaaactttggaggatttatgtcttattctaatttaaaattgtttgctttatcttcaaacaaagaattagcagagaaagtggctaagactattggtattagtcttggaaaatcaactgttcgtcaattttctgatggagaaattcaagttaatattgaagaatctattcgcggaaaccatgtttttattttacagtcaacaagttcacctgtaaatgataacttaatggaaattttgattatggttgatgctcttaaacgtgctagtgctgagactgtcagtgttgtcatgccttattatggttatgctcgtcaagatcgaaaagcacgttcgcgtgaacccatcacctccaagttagttgctaatatgcttgctgtggcgggagttgatcgtcttttgactgttgacttgcatgcagcacaaattcaaggtttttttgatattcctgttgatcatttgatgggagcccctttaattgcggattattttgttcgtcgtggtatgtgtggcagcgactatgtcgttgttagtcctgaccatggaggcgtgacacgtgcgcgtaaattagcccaatttcttcaaactccgatagcaattattgataaacgacgaaatgttaacaaaatgaatacaagtgaagtcatgaatatcattggcaatgtttctgggaaaacgtgtattttaattgatgatatgattgatactgcaggaacaattgctcatgcagctgacgcccttgctgaagcaggtgctactgcagtttatgcttcatgtacacatccagttctgtctggttctgctttagataatattcaaaattcggctattgaaaaattagttgttttggatacaattgaccttcctgaagaaaaattgatagataaaattgaacaaatttcaattactgatttgatttctgaggctattattcgtattcatgaaaaacgaccgctatcacctttatttgaatttacaacttttaactaggaatcgctgaaatagcgatttttttataggatgaaaaacctgctttttttttgtataatagtgttaatctatttgtaaggggtattttatggatttgagtaaacgttttaataaaaatttaaataagattgaagtctctatgattcgtcagtttgatcaatctatttcagatattccagatgttttgaaattgactttgggtgaaccagattttgcaactccaaaacatattaaggaggctgctaaaagggcaattgatgctgatgaaagtcactatacaggaatggcaggacttttggtattgaggcaggcagctagtacttttgtaaaagaaaaatatcatcttacctataatcctgataatgaaattttagtaacaattggagctacagaagctttatcagctagtttaacagctattttggaacctggtgataaagtgcttttgcctgcaccagcttatcccggttatgagcctgttgttaatttggttggggctgaagtagttgagattgataccagagctaatgattttgtcctaacaccagagatgcttgaagaggctattttaaaagaaggagaggctcttaaggctgttattctcaactatccaaccaacccaacaggagtaacttattcgcgccagcaaatcaaaaatttggctgaggttcttaaaaaatatcctatctttgtcatcagtgatgaagtttatgctgagctgacttatacaggagaatttcatgtttctattgctgagtatttgcctgatcaaacgattttgatttctggtttatcgaaatcacatgccatgacaggttggcgtttgggcttgatttttgcaccggctgttttgacagcacagttgattaagagtcatcagtatttggtaactgcagcgaccaccagtgtacaatttgctgctatagaagctttgaccaatggtaaagatgatgctctgccaatgaaagaagaatatattaagcgccgtgattatatcattgaaaaaatggaagcaatgaagtttaaaatcatcaaacctgatggtgctttttatatctttgctaaaataccagttgcgcaaggacaagattcctttaagttcctacaagattttgctaaagagaaggcagtagcttttattcctggtgttgcttttggaaaatatggagaaggttacttacgaatttcttatgcagcaagcatggagactataaaagaagcgatgaaacgccttaaagaatttatggagcaatatgcagactaaagaaacaagaggtttagtgctttataatcggcaatttagagaagatgataagctggttaaaatttttacggaaacttccggcaaacacatgttttttgtgcgtcatgctactaattcaaaattgtcttctgtcattcaaccattgattctagctgattttattttaaaaattaataatcatggactttcttatattgaagattataagggagtctctctttttaaggaaattaatgcagatatttataaattagcttatgctacttaccttgtgtctttggctgatgctgctatttcagatgctgtctatgatgcccctctttttgcttttttaattaagaccctagaattgatggatgaaggtcttgattatgaaatattgaccaatatttttgaaatccaaattctagatcgctttggcgttcaacttaattttcatgactgtgttttttgccatcgtgtcggtttagcttttgatttttcacatcgctattcaggtcttttgtgtcctgaacattatgaaaaagatctttatcgtagtcacttagatcctaatgtcccttaccttttgaaccaatttcaaactttacattttgatagcttaaagaccatttcagttaaacctgacatgaaacaaaagctgagaaaatttattgatgaagtttatgaggactatattggtcttcgtctcaaaagtaaaaaatttattgatgatttagatcactggggacaagttatgaaataaaggaaaatttcaaaaaagagacacttttgatgataggcatttaaaatcactaagtttgtcgtgaaaaaaatgatatgctaaaataattgattattaataaaaagtagccttaattttgctgaattatttatttgttatttttttgtaacgtttaaggttcttttattcatggtataattaagaataactataacgaggagttggattatgaagaaaattgcagttgatgctatgggtggagacaatgcccctcaagctattgtcgaaggagttaatcaggctttagcagatttttcagatattgaaattcaactctatggtgatgaagcaaaaataaagacttatttaaaagcaaatgatcatgtgtctattatccatacggatgaaaaaattaattcagatgatgaacctgtaaaggctattcgaaagaaaaaacaggcttcaatggttttaggagcacaggctgttaaagatggtaaggctgatgcagttctttctgctgggaatacaggagctttgctagctgctggacttcttgttgttggacgtatcaaaaatattgaccgtcctggtttgatgtcatcacttcctacgattgatggtaaaggatttaatatgcttgatttaggagctaatgctgaaaatacagctcatcatttgcatcaatatgctattcttggctctttttatgctaagaatgtcagaggcgttgctcatccgcggattggtctacttaataatggtacagaaacaactaaaggagatccactgcgtaaagaaacctttgctcttttagcagcagatgaaaccctcaattttataggaaatgttgaagcacgcgatttgatgaacggtgtcgcagatgttgttgtaacagatggtttcacgggaaacgctgttttgaaatccattgaaggaacagcgcttggcattatggaacagctgaaaacatccattaagcaagctggtttaagagcaaaattaggagctcttttactcaaaaatagtctttatgatttgaaagattctttggattattcaggtgcaggcggggctgtactttttggacttaaggctcctgttgttaaatgtcatggttcaagtgatgctaaatctgtttactacactattaagcaaatccgaatcatgcttgaaactgatgttgttggtcaattagtagaagaattttcaaacaggggggactaagatgactaatgaagagatttttgacaggatttctaatctcattaaagaacagctgcacaatgaaaaaatagaagttactgtgaagaccaatattcaagaggacttaggaattgattccattgcacttatggagtttatcattacgcttgaagatgaatttaatctgaacattcctgatgaagatgtggaagatattcagaccatgggagaattagtcgactatctttctaggcgtttaaagagttcttagataaataatactaatgttgttaataatggagggtttagttatatgaaagctaaatcctttttttaaatttctcaggtgacatttttgtcactactttttttgcattgccacttttataataatatcatagcttgaaggagtagacatctagacatcgttttggctatcagcaggaaacgctacgcaatttagacttatctattcgatgtggtgaaaagatcgctgttatggggaaaagtggttctggaaagacaactttggcaaaaattcttgcaggctattatactgttagtagcggtgactctttcttagatggagaaaagataaattattcccagctgcgccaattagtaacttatgtgccacagcagtcttatgtttttacaggaacaatcttagataatctgcttcttggtgctgaagaggaagtaacggatgatcgcttaatggaagtttgttcaattgctgaaattttagacaatatcaaggcaatgcctttaggttttcaaacacagatttcagaagacggcggtttatctggtggtcaaaaacagcgtttagctattgcacgtgctctcttaaccagacagcctgtgttgatttttgatgaggcaactagtggtttagatcgtgataccgaagaaaaagttattgccaatttatctaaattggagcgcacgattatttttattgctcaccgaggcagtgtttcttattatgctgatcgaattgttgagattgactctggagagaaaattaaggatagaataaatcatcgtcctttctcatttttgatgatgactctttgaaagattgttcgttaaatacgaacaatcttttttagttttattataaagtttgtagattgttgaatttaaaatgagggtatgttaaaataagttgaatactttatgaaaggcgaacaatttgatggcaaaagaacttatttattcgggtaaagctaaggatattttgacgacagaagacgaaaatgtgattattgcacaatataaagaccaagcgacagctcttaacggagtgaaaaaagaacaaatcgcaggtaaggggcagcttaataatcagatttcgtctttaatttttcaaaaattaaatgcggctggggttgcaacgcattttattaaaaagatttcagaaacagaacaattgaataaaaaagttaagattattccgcttgaagttgttttgcgtaatgtgacagcaggctctttttccaaacgttttggcgttaaggaaggtattcagttggagaagccaattgttgaattttactataaaaatgatgatttggatgatccttttattaatgatgaacatgtgaaatttttaaagcttgctaacgatgaagatattgcctatattaaagctgaaacacgtcggataaacaaactcttgtcagattggttccataaaatcggacttaaattaattgattttaaattggaattcggttttgataaagatggtaaaattatcctagcagatgagttttcaccagataactgtcgtctttgggatgcgcaagggcatcacatggacaaagatgtcttccgaagagggttaggagaattaacggatgtttacgaagtggtatgggaaaaattgcaagaacttaagtaaggattgaacatggatagacgtatttttgttgagaaaaaagctaactttagcattaaatcggagtcactggtcaaagaactaacacataatttgcagttaacctccttaaaaattttacgtattgtgcaggtttatgatatctttaatttagaagaaagcctgtttgcgcgtgcgcaaaagcatgtcttttctgagcaggtgacagatacaattttagatgaagcaactgtgcaggcggatcttaacagccatgctttttttgctattgaagctttgccgggtcagtttgaccagcgggcagcaagttcacaagaagctttgctcttacttggtagtgacagcaacgtaacggttaatactgcccagctttatctggttaataaggatattgatgcatctgagttggaagcggtgaagcattatcttttgaatccagttgattcgcgtttcaaagatatcaccttgcctattcgtccacaggaattttcaaattctgacaaaacaattccaaatttggatttctttaagacttatacagctgaagattttgcggcttacaaggcggaacaaggtttggctatggaagtggatgatcttgtttttattcaagattattttaaatcaattgggcgtgtgccaacagaaacggaattgaaagttttggatacctactggtctgaccattgccgtcacacgacttttgagacagaattgaaaaatattaacttttcagcttctaagttccaaaaacaattgcaggcaacttacgataaatatattgccctgcgtgacgaattgggacgttctgaaaagccacagacgcttatggatatggcgacaatctttggtcgttatgagcgtgctaacggtcgtttgaacgacatggaagtgtcggacgaaatcaatgcctgctcggttgaaattgaggtagatgtagatggcatcaaagaaccttggctgctcatgttcaaaaaagaaacccacaatcacccaacggaaattgagcctttcggtggagctgcaacttgtattggtggtgctattcgtgacccattgtcaggtcgttcttatgtttaccaagctatgcgtatatcaggtgcaggtgatattaccgcaccaatagcagaaacacgctctggtaaattgccacaacaagtcatctctaaaacggcggcgcacggctattcgtcatacgggaaccaaataggacttgcgactacctatgtcaaagagtacttccatccaggcttcgttgctaagcgtatggagctaggtgctgttgtcggtgcagcaccaaaagaaaatgtcgtgcgtgaaaaaccagaagctggtgatgtggtcatccttcttggtggaaaaacaggacgtgacggtatcggtggtgctacaggctcatctaaggttcaaacggttgaatcggttgagacagcaggtgccgaagtgcaaaaagggaatgctattgaagaacgtaagattcaacgtcttttccgcaatggcaatgtcactcgtctcatcaagaaatcaaatgactttggtgctggcggcgtctgtgtggctattggtgaattggcagatggtcttgaaattgacttggacaaagtgccactaaaataccaaggtcttaacggtaccgaaattgccatttctgagtcacaagaacgcatgtctgttgttgttcgtccaagtgatgtggacgcctttattgcagcatgtcataaagagaacattgatgcagttgttgtcgcgactgttactgaaaaaccaaaccttgtcatgacttggaatggtgaaaccatcgttgacttggaacgtgctttccttgatactaacggtgtgcgtgtggttgttgatgcaaacgttgtggataaggatgttgcccttcctgaggtgcgtacaacatcagcagcaacacttgaagcagacacagtgaaagttctgtctgatcttaaccacgctagtcaaaaagggttgcaaactatctttgacagctcggttgggcgttcaacagttaatcatccaatcggcggtcgttatcaaattacgcctactgaaagctctgtgcaaaaattgccagtacaaaatggtgtcacaacgacagcttctgtcatggcacagggattcaatccttatattgcggagtggtcaccttatcatggtgcagcttacgctgttattgaagcaacagctcgcttggtagcgacaggtgctgattggtcttgtgcgcgtttctcttaccaagaatactttgaacgcatggataaacaagcggatcgctttggtcagccagtagctgctctgcttggttcgatcgaggcacaaatccaacttggtttgccatcaatcggtggtaaggactctatgtcagggacctttgaagaattgacggtaccgccaaccttggttgcctttggtgtgacaacagtagatagtcgtcaggttctttcaccagaattcaagactgttggtgagaacatttactacatcccaggacaggctatttcagaagatattgattttgacttaatcaaagataactttgcacaatttgaagccattcaagctaagcataaagtaacagcagcttcagctattaaatacggcggtgttcttgaaagtttagcacttatgagctttggtaaccgtattggtgcaactgtagaaatagctgagcttgacagcagcttgacatcgcagcttggtggtttcgtctttacatctgatgaagccattgctgacgcagtgaaaattggtcaaactgtggcagactttacagtaactgtcaatggtgtcaatctgtctgctgcgaaattacttgcagcttttgagggcaggttagaggaggtttacccaaccgaatttgaacagtcaacagctcttgaagaaatacctgctgtggtatctgatgctgttattaaagctaaagaaagaattgcacagcctctggtttatatcccagttttccctggttccaattcagagtacgattcagctaaggcctttgaacaagctggtgccaaagtcaactcagtgccatttgtgactcttaatgaagcagcgattgaggcttctgttgacaccatggttgacaacattgttaaagccaatattatcttctttgtcggcggcttctcagcggcagatgagccagacggttcggctaagtttatcgtcaatatcttacttaatgaaaaagttcgctctgctattgacagcttcattgaaaggggtggcctcatcatcggtatctgtaatgggtttcaagctcttgtcaaatccggtcttctgccttatggtgactttgaagaagttggtgagacaagcccaaccctcttctacaatgatgccaatcagcacgtggctaagatggtggaaacccgtatcactaataccaactctccatggttggcaggtgttaaggtcggtgatattcatgcgattccagtctctcacggtgaagggaaatttgtcgtgacagctgaagaatttgcggaactgtgcgacaatggtcaaatctggagccaatacgtggactttgatggtaagccttctatggattctaaatacaatccaaacggttcgctcaacgctattgaagggattacgagcaagaacggtcaaatcattggtaagatgggacactcggaacgctatgaaaacgggctctttcaaaacatcccaggtaacaaagatcaaggcctatttgaaagtgcagtgaaatactttactgggaaatagcctatttgtagaagggatattatgaaacagtatgttgcaaggctagaaaaagatttttcactcatagaacacggatttaaagaggaagaacaaagagccttaactgattataaatccaatgatggtgagtatatcaagaaattagcatttttagcttatcaatctgatgtttaccaagtaagaatgtacgctgtattccttttcggatacttatcaaaagataaagaaattttaatattcatgagagatgaagtttctaaagataatgactggagagttcaagaagtgttagcaaaggcgtttgatgaattttgtaagaaaataggatataaaaaagcacttccaattattgtgaatggttaaaaggtagcaatctccatacgaggagagctgttacagaagggttaagaatatggacaaatagaccatactttaaagagaaccctaatgaagctatcagaagaatagctgacttaaaagaggatgtaagcgaatatgttaggaaatcagtagggaatgctttaagagatattagcaaaaaatttccagatttagttaaaattgagttgaaaaattggaaattagaaagtaaagaaattaaccaagtttataaattggcaagtaaatttattgatgcctagaatttaagtacaaaaggtatataaaatgacatacgaagtaaaatctctcaacgaagaatgtggggtcttcggtatctggggacatcctcaagcagctcaagtcacttattttggactgcatagtctgcaacaccgtggtcaagaaggtgctggcattctgacaaatgatgctggcaaattgatacgacatcgtgatacaggattaatttcagaagttttcaaaaatccagctaatttggaaaaattaacaggtcaggctgctattgggcatgtccgttatgcaacggctggagaagcctccattgataatatccagcctttccatttcaagttttacgatatggaatttggtctggcacataacggtaacctgactaatacgaaaaccctgaagaaagaattagaacataacggcgctatcttctcttcttcatctgatacggaaattctggctcatcttattcgccgcagccataatccaagctttatgggtaaggttaaggaagcgctcaatacggtcaaaggtggttttgcctatcttctgatgatggaagataagctgattgcagctcttgatccaaacggttttcgtccgctttctattggtaaaatggcaaatggtgctatcgttgtttccagtgaaacctgtgcctttgaagtggtgggtgccgagtggattcgtgatgtcaagccgggtgaagtggttatcattgataacagtggtatccagtacgacacttacacgacagatacgcagttggctatttgttcaatggaatacatctactttgcccgtcctgactcaaatattcacggggtcaatgtccacactgcccgtaaacgtatgggagcacagttggcgcgtgagttcaaacatgaggcagacattgtggtcggtgtacctaattcctcactcagcgcagctatgggcttcgccgaagaatcaggactgccaaatgaaatgggtctcatcaaaaatcaatacacccaacgaacctttatccagccgacgcaagaactgcgtgaacaaggggttcgcatgaaactttctgccgtatctggagtggttaagggcaaacgtgtcgtcatgattgatgactccatcgtgcgtggaacgacctcacgtcgtatcgttcagctcttgaaagaagctggtgctacagaggttcacgtggctatcggtagcccagcgctggcttatccatgtttctatgggattgatattcaaacacggcgtgaattgattgcggctaatcattctgttgaagaaacacgccagattatcggtgcggatagcctaacttacttgtctattgacggtttgattgactctatcggacttgaaacagatgccccaaacggcggtctctgtgttgcttactttgatggcaagtacccaacaccgctttacgattacgaagaagagtatcgtagaagcttggatgagaaggttagcttttattgatagaccgaactcaatagcagctctgctattcccaaaggaaaaaagaaggaagaatattatgacagaaaaaaatgcttacgctcaatctggtgttgatgttgaggcgggatacgaggttgttgctcggattaagaaacacgtggcgcgtacggagcgtcttgggattatgggagctctcggtggcttcggtgggatgtttgatttgtcccagctggacgtcaaaaagcctgtcttgatttcaggaacggacggtgtcggaactaagctcatgcttgcgattaaatatgacaagcacgacactattggccaagactgtgtagccatgtgtgttaatgacatcattgcagcgggggctgaacctctttatttcctagactacattgcaacgggtaagaatgaacctgctaaactggagcaggtggttgctggtgtggctgaaggctgtgtccaagctggtgctggtctgattggtggcgaaacagccgaaatgcccggtatgtatggcgaagacgattacgacttggctggttttgcggtcggtgtggctgaaaaatcacaaatcatcgacggctcaaaagtcaaagaaggagatgtgctactgggattggcttccagcggtatccattcaaacggttattcgcttgtccgccgtgtctttgcagactatactggtgaggaagaactgccagaattggaaggtaaaaaactcaaagatgtcttacttgaacctactcgtatctatgtcaaagcagctctgccattgattaaggaagaattagtcaacggtattgcccacatcacaggtggcggctttatcgaaaatgtcccacgtatgtttggggacgatttggcagccgaaatcgaagaagacaaggtgccagttctgccaatcttcaaggcgcttgaaaagtacggtgaaatcaagcacgatgaaatgtttgaaatcttcaacatgggtatcgggctcatgctggctgtcagtcctgaaaaggttgaccgtgtcaaggaagtccttgatgagcctgtttatgagcttgggcgtatcgtgaaaaaagctgacgcaagtgtggtgatcaaataatggctcaaaaaattgctgttttcgcttctggtaatgggtcaaattttcaggtcatcggcgagcaattcccagtagaatttgttttctctgaccatcgtgatgcctatgtcttggagcgtgctaaaaatctcggtatcaaaagttacacctttgaactcaaggaatttaacaacaaaattgcttatgagcaggctatcattgacctcttggaaaaatatgctattgatcttgtttgcctagctggttacatgaaaatcgttggcccaaccttgctgactgcttatcaaggtcgcatgatcaacattcatccagcctacttacccgaatttccaggtgctcatggcatcgaagatgcctggaatgccggtgttgatcaatccggtgtcaccatccactgggtggactcaggtgtggatactggcaaggtcatcaaacaagtccgtgttccacggctagttcatgacacgattgaaagttttgaagatcggatacacgaggttgagtataccctttatcctcaagtgctggagagcttgggggtggagaggaaataaagagttatacttatgagtagttattatctagaagtatctaatgagttgaaaaaaataattaaaaaattaaagcgagaagaaagaataaattatccgaagctttggttgtatctacgattatttttgagttttttagtaatttgggttatatcatctttaatcggagtttcttttctttttgatataaaaaacagtacaaatttaagtatttatatcaaatttttgtttgccatttttgccatttctggttcaggatctattatttttatgatttgttattgttatctaataaaaaaaagtataagcaaaattccgggcggattagagaacatacgtaatagaaaaacagctgagcaaataaaaaattttgttgagaagcgattctctaagaatccgattggagctattgataatctgattgatgagttaacagaaactattgttaaatggcggagacggcacttgtggtgcatcaacgctgttgttttagttctttcgattgtattgttaccacccttaaagagtaattggaaaactaacatagctactattttccaacaacaacaaatgatatttcaattgttgctagttatagttataatatttattgtttgctttgttgggtttatatggcatgggctcacatatgagccactatttgaattcggaagaagtcaacaatatttccaacaactaaacatattgatggaagtaaaatatttaatgtgtggaggaggagaaaacatgacaaacaaacgcgcacttatcagcgtctcagacaaatcgggcattgttgactttgctcaagaattgaaaaacttgggttgggaaatcgtctcaaccggcggaactaaggttgcccttgacaaggcagggattgacaccatcgctattgacgatgtgactggctttcctgaaatgatggatggtcgtgtcaagactcttcacccaaacattcatggcggtctattggcgcgccgcgaccttgatagtcatgttaatgctatgaaggaacatggaatcacaccgattaatttggtcgttgtcaacctttacccattcaaggagactattcttaaaccagatgcgacctatgcggatgcggttgaaaatattgatatcggcggaccatctatgctgcgctcagcagctaaaaaccatgccagtgtgacggttgtggttgatccagcggattatgcccttgttttggacgaattgtcagcgaacggagaaacaacttatgaaactcgtaagcgtctggcagcaaaagttttccgtcacaccgcagcttacgatgccctcatcgctgaatatttcactgctcaagtgggtgaagaaaaacctgaaaaactcaccttgacttatgacctcaagcagccaatgcgttatggtgaaaatccacagcaggatgcggatttctaccaaaaagccttgccaactgcttattctattgcctctgctcagcagctcaatggtaaggaattgtccttcaacaatattcgcgatgctgatgcggctatacgtgtcattcgtgactttaaagaccgtccaaccgttgtggcgctcaagcacatgaatccatgtggtatcggtcaggctgatgacattgaaacagcttgggattacgcttatgaggctgattcagtttcgatcttcggcggcattgttgtcctaaaccgtgaggttgatgcagcgacagctgagaagatgcacgctatcttcctagaaatcatcattgcgccatcttatacagacgaagcgctagctattctcacaaccaaaaagaaaaatctgcgtattctgcaacttccctttgacgctcaagaagctagcgaggctgaaaaagagtatactggcgtggttggtggcctccttgtgcaaaatcaagacgtggtcaaggaaagtccagccgattggcaggtcgttaccaagcgccagccaactaaaacggaagaaactgctcttgaatttgcttggaaagctatcaagtatgtcaagtctaatggcattatcgtgaccaatgaccacatgacacttggtgtcggtccgggtcagaccaatcgtgtcgcttctgttcgcatcgccattgaccaagctaaagatcgccttgacggggctgttcttgcttctgacgctttcttcccgtttgctgataacgttgaagaaattgcagctgctggtatcaaagctatcatccaacccggcggttccgtccgtgaccaagagtctatcgatatggctaataaatacggcattgctatggtatttacgggtgtgagacattttagacattgatgggtatttaaaaattagctcattattaactgtaatgaatgacttatcgctaacaacgagaggagatgcaagtcgtcttctctttttgtatgtctaaaacaatgatcattttaattttagaaatgattaaaacgatttgttgaatctgctcatgattaatctcgaaaaactcagcttctcgcttaactatccttcatacgttttatggtgtttaaggctgtagtgaccagttcattaacaggcattgtttggtgatctgtttttaaccattcatcaaaaatactgtagagaccgccgataatgaatctactatcataggtgatttgtctttgatcactgtttgtgatgtgccaaggtgccatgacagtggtataagcagcaggaagcttatcataatacctttgcaagataagcactagcaggtttgcatcctgcaaaatttttaatgactcagtgtactggctccaatactgaaagaaaaggttcactaaatcttcaaaattagtcagtttttctgtttgaagttcgataatatagtcttggattaagcggtctaaatagttcgtaaggacttgctcttttgaatggtaataacgataaaacgttcgtctagcaatctgggcatgctcgctgagttctgcaatgctgatattatgcagggatttcttagttgctaataaatcgaacaaggcttcctccagccattgccgtgtttgatattccatggtagctctcctttcctgtcacacttctggtcaaactgtgccaatttcacttagcctcttgtttttgtaacagtttgtctttatactaaaagtgttgcgcgtgatacattattatcatttatccttagcattgtacaatggttagttgttattaaggaggtaaaaatatgagcattctttttaatgtttggatgctgcctattttatttattttacacgattttgaagaaatgatctttgtgcccttgtggaaaaaacggcatcatcaaaagttagtgacttttaagaaaccgttctttggttctgttacgcagggttctgcctttgcagtaggcgttttagaggaatttgtcatcttgctgcttatttctggtctttgtcaaatgacccacaataccttactctatttatcttttgtaatagcttatacatctcatttcacgatccattatatcatgtgcctgcgatttaagggctatgttcccggagtcgtcacggcaagcctagaattgccaattgttttaatgattattttctgctattggccttctgacgtttccctgctgtcagtcattgtctatcttttcatagctatggcaatagcttatactaatcttaaagtcatgcaccaaatcatgccaaaaattcaattaagcctagaaaaatacatgaaataaaaaatgattaattgagaactattttaagctttctgaaagaaaagtttaaggagcggttaagaaagatcttatatactatagtcatcctagcaataggaatcctaaaacttttctttttcataaatctcctaaaaagcccgcttccagcgagtttttcattttggtttgagaaattgatggtactgacaatacaagacagcaaggcattaattggcaatatcaaagatttctggcattaccgcgtcggacactatcgcatcatcagccgtattgaagatgaggagctgattattgtagctgtcaacggcggacaaatgtagataatactgaaatagagaaagttttaagtgaagcaaaagagaataacgttaaggttggattttcgaatagttgtttcgaggtatggttgttggctcattttgagaaacctaaccaatctcatacaaagttaaaattatataggcaactagaaaaatatttggattgcaagcaatattcaaggaatcataaaaatgacatagaattattaagacaattagaagatctggtatcaatagcaatagaaaatactagttcaatgaagaactttaaccaaacacatattatatatgagccttatactaatataggagaagtgatacaaaatatttataatagagatatgtattaatccgtttttatcattttgaatttattacaaaaagttcgcatcattgttttgagcgaacttttttcttttcccttaatttcaaactcccgaacaaatatgttataatagtcctgtataattcgtgaaaagttgttagtttttgcgaaaatgtttaattttgggcatatgcccctgtgattgttttatattgaggtatcttgcattatgaaacttttggttgttggttctggtggtcgtgagcatgcgattgccaagaagttgttggcgtctcgggatgttgagcaggtctttgttgctcccggcaatgatggcatgactctggatggtttggatttggtgaatatcggaatttccgaacattccaagttgattgactttgccaaagcaaatgctattgcttggacctttattggtcctgatgatgcactagcggctggtatcgttgatgattttaaccaagctgggcttgaggcttttggtccaactaagttagcagcagagctggagtggtctaaggattttgctaaggaaatcatggtcaaatacggtgttccgacagcagcctatggcacattttccgacttcgagaaagctaaagcctacatcgaaaagcagggcgctccaatcgtggtcaaggcggatggcttggcattgggtaagggagtagtcgtggctgaaaccgtggagcaggcggtcgaggcggcgcatgaaatgctgctgaacaataagttcggcgactcgggtgcgcgcgtggttattgaggagttccttgatggcgaggaattctctctctttgcctttgtcaatggggacaagttttacattatgcctgcggcgcaggatcacaagcgtgcctatgatggtgacaagggaccaaacacaggcggtatgggtgcctacgctcctgttcctcacctgccgaaaagcgtgattgaccagtcggttgataccattgtcaagccagtgcttgagggtatgattgctgagggccgcccttatcttggcgtgctctacgcggggcttatcttgactaaggacggtcctaaggttatcgagttcaactctcgctttggcgatcccgagacccaagttatcttgccgcgcctgacttctgactttgcacagaatatcacggacattttggctggcaggaaccctgacatcacttggttggattcgggcgtgaccctaggcgtggtggttgcttcaaatggctatccgcttgcctacgaaaaaggggtgcttctgccagaaaagaccggtggcgacataatcacctattatgcaggggctaagtttgatggcaatagccagctgctcttgtcaaacggcggccgcgtctacatgctggttactacagccgacagcgtcaaggctgtacaggacaaaatctacacccaactgaataaacaaaacacaacaggcctcttttatcgtacggacatcggaagcaaggctttgtaaatcaaatgtattaaactttgagccgtgaggcttgaatatagaattctggtgtttgaaaaatgaaaaacagactgctatttttagaaggttctagcttaacttcaagagagactctaacagtattgctaaaagagggctacaaagttgatgtcctgtctcctgataagttttctattgcaacattcagtcgactcactcatagaattccgacagttgatgtaaatcgttttcctttagattacttgaaacaagttaatcagctgcttcatcaaaaaaattatgcagctattttgccgacacatgaggaaggctggttattggcaaatgggggaaattttttaccaactcgtttgccagtagcgcttgctgataaggaacaaattgaaaagctggctgggaagattgcgtttgctgaaatttcggatcagttaaatctgccaattcctaaatgggagcgtgtggaaaatttagaatctgtttctcttccttatccttattggctaaaggcagactatggtactgccggtcgttcggtttataaaatcacaagtaaggaagatttggcggaagctgcgagcagattaacagcgagtgatgaaaaatggatggttcagcaagacatagtcggagactatggtcaggttcaagcagtatttcatcatggtcagttacttgcggttcattctagtgttaaagtgggttctggtgccggtggttcagctgctgctagattaagtatagaatctgagaaaacgagagagcatgtcgaaaaattaggtcaatttttacaatggcatggtgctttaactttagattttatacgtaccgacggtcatttttattacatagagtgcaatcctagaatggttgaacctgctaatgcctacaaagcaggagttaacttcccaaaaatcatgatagagttagccaatggctgctattccaaatctgatgttagtgttgggcaagcaggggtagggacgcatagcctgatggctttgcttatcggtactgctgagcgaacgaagagtagaaagaagattgtacggacaatgaggaagtggctttttaacagtgacagtgaagaggtgttaacacctatttggaaggatcctctaagttttatacctcttgcgattattatcagtcgcttattgataaatcctagaagtgtcaccaagttggttgataagaccgttaaacattatagtgtggaaccgaccactctaaaaaatatttgagcaaaagattccgtttattcaaaggaacattctgttagttttcctatttttctatgaaaattttgcaagcgacaaaaagtcgctataaaataaaaaacgaaaggaattaaacacgcctacgacaacaacactgggcaaaaagatgagtctgacgacgaggcacaagcctctaagaaagacttatgctgtagatgtctgaactttctacgccagtaggctaagaaagtcctagtcgtcctgatgggggtgcgtcagcgaaatcaaagttttctgatttaccgcccattttgttggaggtcgctttatggcgtttgtatcttattatgaaaccacttatttctattatcataggctccaaatccgactggagcactatgcaaaaaaccgctcaagttttggataacttcggcgtggcttatgagaagaaagtcgtctcagcccaccgcacaccagacctcatgttcaaacatgcagaagaagcccgcagccgcggcatcaaggttatcattgcaggtgcaggcggtgccgcgcatttaccgggtatggtggcagctaaaacaacactgcctgttatcggtgtgcctgtcaaatcacgcgccctcagcggcttggactcgctctattccattgtgcagatgccgggtggtgtgcctgtggcaaccatggccattggtgaagcgggagcgaccaacgctgccctgacagccctgcgtgttttggccattgaagaccaagacttggcagccgcgttagcagatttcgcagaggaacaaggaaaaatcgcagaggagtcaacgaatgaacttaactaaaaccattggcataatcggcggcggtcagctgggtcagatgatggctatcgcggcggtttacatgggacataaggtggtgacgctggatccgacggcggactgtcctgcctcgcgcgtgtctgagatgattgtggcgccttacgatgatgtggatgctttgcgccaattggcggagcgttgcgacctgttgacctatgagtttgaaaatgtcgacgctgacggccttgatgcggtcgtaggagacgctcagctgccgcaggggactgatttgctgcgcatttcgcaaaaccgtatttttgaaaagaacttcctcgccaacaaggctggtgtgacggtcgctccatataaggtggtaacctctagtttggacttggaggatttggatttgggcaagacttacgtcttgaaaacggccacaggcggttatgatggtcacggtcaagtcgttattaaatcacacgacgatttagctgccgcgaaccaattagcaaactctgctaagtgtgtcttggaagagtttgtagactttgaccttgaaatctcggtcattatctcaggaaacggcaaggacgtgacggtcttccctgttcaggaaaatatccaccgcaacaatatcctctcaaaaaccattgtcccagcccgcatttcagaccagctagccgagaaggccaaagccatggcggtgactattgcccaaaaactccagctatcaggaacgctctgcgtggaaatgtttgcgacagcagacgatatcattgtcaacgaaatcgcaccacgcccccacaactcagggcactactccatcgaagcctgcgacttctcacaatttgacacccatatcctaggcgtcctcggccaacccctcccagccatcaaactccacgccccagccgtcatgctcaacgtcctcggccagcatatccagcaagcccaagcctacgtcgctcaaaaccctagcgcccacctccatctttacggcaaggcagaagccaaacacaaccgcaaaatggggcacgtgaccgtgtttagtgataatcctgatgaggtgagagagtttggggaaggagtggattgatggagattactgtatagaattagataaggagagagtttgtctttatatacgattctagtgccaagagaagttaattctacagttactagcgtaatgttattaaacatgaaatttgttgaagtgatatcaaaggttaatcaatttgatgagatcaggtttgatttttcaaagacacagtgggttgatgcagagatgacagtagctttagctatgatgcttgaaattagtttattgactgttgagacagttagtgtggataatgataacattaatgaagaacttaaaacaattctcaggaaaaataattttttccctcaatatggaatagcttcaaagctatttgatacatatgggactaccattaatttttttgctaatattgctagtaatgacaaacttatttacgaatatattcatgaggaagtttttccatctatacgtggaaatatatctcaagattttttgaaagaagtttcttattgtatttttgaactggtgcataatgtaactgagcattcaaattcagagcgagtttatatgtgtgggcaacattaccctcagaaacggatattacgattagcgatttcagatattggcttgggacttccgtcaaaaataaaagagaaaaatccccacatagtatccgatacggctgccgttgaatgggctctcgaagagggaaatacaacaaaacgtggtgcagaaggtggtatagggttgtatagtgtaagagataagttgttagatagaggtgtattaaaagtaatatctaatcaagcatattatgagataaaatccaatggatcagtgatgtctcagacgatgccagagcgatttcgaggtactttaattattttagaattcgatataaaaaaatgtttgaaatctcgagaaagtggcaaaatctttaataatgaatctctagggttctaggaggaaataatgtcaaaaagagtcgttgtaagcaatgttatagaagatagtatagcagtcaccgctgagaaaggacagctattatataacgagcttgaaaaaaatataaaaaataatgagatttctattctagatttcagtaatattagtgatttgataagtgcattttcaaatgtagctattggaaaattatatgatattgcaactcctgaggaacttaataggctagtaaaggtagatcctcaaactttgcatccaactgatagaaagacaatagagcgttcattaaaaaatagcaagaagaagcgagaacaatctaaagaatttcaaagaaggttaggagagaacttagataatggggtggaattatgacatgcaaagttttcaatttaaataatgttccttttggctcttcaagaaaacttctgatagatactaatgtcctgttatatcttcaaacgggggatacacacagttacgataaaatgtgggatctagcgattaggcaaaagaatcaactttttattacaagtctaactatttctgagtttataaactattattgtagaactgcatatcatgcttatactgaaaagtatgaatttgatgagagtgaatttcaatataaaaaggattatcaaaaaacaaatgattttaaagagcattatttcgaggcaatagataccttggaaacagaagttttccccagggttaggattatagattttgttcaaggtgattttgaaaatttaaaaaaattcactgaatatatgtatgatttaaacgatgctctttttatgaagttagctttacgagaaggctattcaattgttacccatgatgcagatttttttagtattccaattaaagaatctatcaatgtatatacctataataaataagaaaagatttaaacaaaataattaatcgttatttataccctgaaatgataatcaatctaatcggagaacaaacatgaaaacaatcggccttattggtggcatgagctgggagagtacgacttcctattatcagcttatcaacgagacaattaaaaaagagcttggcggactgcattcggctaaaattctgctttacagtgttgattttgcggagattgagcactatcaggccagcggtgactgggctaagagtgcggaagtcctgagccaaattgcccagaaactggagcaggctggtgcggactttattgttatctgcacaaacaccatgcacaaggtggctccgcagattcaaaagcaaatcgcgattccgattttgcacattgcgcaggcaactgctgaggctcttcttgaaaatggcattcaaaaagttggtctcttgggcaccaagtacaccatgactcaagacttttacaaggaaaagctgcttgaagcagggcttgaggtgctgattccagaccaagctggcattactgaagtcaaccgaattatctatgatgagctgtgcttgggagacatcaaagacagctcaaagcagacttaccttaccattattgatgatttgaaaaatgctggcgctaaagccgttatcctaggctgtacagagattggccttttagtcaaacaggcagacacagcccttccgctctatgatacaacaactatccatgctcaaaaagcggcggaattagcaataaatgggtgattattgtgttaaactagaagtgtaactacaaaaggctatgcaattgggtttgtaaaagatgctgaagtggtgtggatatcaggaggttaacacatggaactattcatcgcaaagatagtcagtagctttttagaaataatattagctgctgcaattccgtttctctactggattttcacagaaagaaaacagtctacttttctaaactggttaggatttaagaaagttagtaaacatgattttaaacgattctttgtacccgtgttgggaatgattctattattttcattggcttccttttttatcttacttcgcttaaagggagtgtcaactcagtcgttgaaagattgtaatataggagtggatatatggtgaaatcgaatataaaagcgagtttttcttatccgattgatcaggtgtggaaacttgtcaccgacttgtccaatcaaacttggagaagtgaacttggtcagtttgaaaaagtagatgacaatcattttcttgaatacactcaaaatggtcttcagacgaactttaaggtgacaaaagtcaatttgcataagctctgggagcttgaatttgaaaataaaaatctccaaggtacttggataggtcgttttgattatcaggatggacaaaccattctagattttacagaaaatatcactgttaaaaatgccctcctgacaccatttgtgtggctttatttaagaaagcagcaaaagcagtattttcgagatttagaaaaagcgctgaaagttaaatcgcaaaatgagatgactgatggtagttagtgataaagttgatttctgattgggggatatatgggcgaattagccataaaaaatgataaacttgtcaaagcgaaagaagcgggaaataccccacttgatgttgaactatttcaaaataaaagaaaaagttttgaacaagttggtaattatttttcgactattgctaattcttacaatgaaattaaacaaaatatcaatcctgaggaaatgtatgttgttaaatttactcgggagcagttgaaaaagttccaaaatggagagattgattttcaaaagacagcggataggaagtctttattacccaattttgtgactagaggaacaaacaacagtattgtttctaaagctcgactagaaaaaatcgtattagataatcctgaagctttacagaatgttgtgtcaaatattaatcggttggttgaggttcaaaaggtcaatgagctggagttattactttcagaagttaaacagattggtttggatattaaacagggccaaaaagatgatagacgttctaaaatattgggtgcagaaagtacaatagagcaagcattattgataagtgatgaaaaccctcaaaaagagcacttattattaaatgcaattagtcagttaaacgaaggcagagaagctattattaaagagtttgaaggggtagtgaccagaaattcatctataccgaaaaatgattttatattgtttttaaaatcaacctttgatgataaatttaatgagagcgtttcagatagctttgcagaattaaacgaccaattttcatatattgtaaaggcaagcgatttgttggctaaaacatacacagtgacaggaaatcctgaattgattgatactgtgtattcacctgttaagaccttgattgaaaataatcatgaatacatatcaaaattggtggaattacaggaaataagtactgaagaccaaaggcgattaaaatggtgcattgagccaaatgattttgttgagagaataggagtaacagaattgtcaaatgatgatataataacaattgaattttcaggtcatgaattattaaaaggagtagaaaatggatagaaaacaaatacataagattgggaaggttatgaataagcctgttaaatttataaagaaaaattcaagaaaaattttaacaggaattagtgcagctgcttcattagttgcattgattaatggcagaaaaaaataggttgactattacacatagaattcaatttgagtaaaaggttattattgaaactaaatacggttacctaatctttcaatatttataaagttatcttgcgaccgtaggtcgccccccaatgtttcacgccgtggggagagcgtaagcgacggaaatcttaagaccttaggctcaagatttagtcatgagattccgaaggaagctgctgacgtccaccccacttaagtgaaacataaaaaagaaaggaaaaataaaaaatgatcaaccgttattcacgccctgagatggcgaacatttggagtgaagaaaacaagtaccgtgcttggttagaagtggaaattttggctgacgaggcttgggctgagttgggtgagattcctaaggaagatgtggtcaagattcgcgagaaggcggattttgatattgaccgcattttggagattgagcagcaaacccgtcacgatgtggtggcctttactcgtgcggtttctgagacgttgggtgatgagcgcaagtgggtacactttgggctgacctcaacagacgtggtggacacggcctacggctacctatacaagcaggctaacgccatcattcgtaaggacttggataatttccttactatcatcgctgataaggctaaggagcacaaatttaccatcatgatggggcgcacacacggtgtccatgcggagccaacaacttttggtctcaagctggcgacttggtacagtgaaatgaagcgtaatattgagcgttttgaacatgctgccgctggtgtggaagctgggaaaatctctggtgctgttgggaactttgccaacattccgccctttgtggaaaaatatgtctgtgacaaattaggcattcgtgctcaggaaatttcgactcaagtcttaccgcgtgatttgcacgccgagtattttgcagtactggcaagcattgccacatcaatcgagcgcatggcgactgaaatccgcggtctgcaaaaatccgagcagcgtgaagtagaagaattctttgccaaggggcaaaagggcagctctgccatgccccataaacgcaatcctatcggctctgaaaatatgacggggcttgcgcgtgtgattcgcggacacatggtgacggcctatgaaaatgtgtctctctggcatgaacgcgatatttcccattcatcagctgagcgcattatcgcgcccgatacgaccattctggttgactacatgctcaatcgctttggaaatatcgtgaaaaacttgaccgtcttcccagaaaatatgaagcgcaacatgggctctacctttggtctcattttcagccagcgtgctatgctgaccttaattgaaaaaggcatgacccgcgagcaggcttacgaccttgttcagcctaagactgcacagtcttgggacaaccaagtggacttcaaaccgttgctggaagcagatccagagatcacgtctcgcttgagccaagaagaaatcgacgaaatctttaatccagtctactacaccaagcgtgtggatgaaatctttgatcggattggattgggagactaaatacaaaacaaggcggccgatgggctgccttttatgctataatcaagctatggacaagaaaacacttattcaaactttttatgatcatgcagacaaagagcgggcgcatactatggcagcctatatgcgtgaccagtttccttttctaggtctttttactccgcttcgccgtcagttggagaaggactttattaaagaatctaaggcgtctaaggcagttgattgggtttttgtggaagagttgtgggaactgcctgagcgggaatttcagtacgctgcttgtgattatttacgggctatgcagatctttttaacggaagcagatctgcctcgtctcaaacagctggttgtaaccaagtcttggtgggatacaacggacagtttggacagaaccattggcaagatcaactttcccagtaatatagttgatgcaactatgttagagtggtcctctgatgataacttttggctgcggcgcgtggcaattgaccaccagcttttacgaaaagataagatgaagacaaatcttttggagaagattctcattaacaatctcaatcaaagcgaatttttcatcaataaagctattggctggatcttgcgagactactctaagactaatccagattgggttagaacttttattgaaaagcataaaaatcagatggccaatttatcgattaaagaagctagcaaatatttatgataagccgcttatcatattttatatcacacgaaaaacaaccgctgggcaagtaggataagctgaaattttctagccagtcgtttttaagagcctgtattcataaattcttttattgtggccttgcggtcgcttttaataagctagcgcttattcataactaaatgatttctgtaagtacaggttctaagtataaagaataagaaaacaaagattaatcgtttgctgcaagactacgcttatgtcttatgcttcctttttgaaactcgctgaatgtgttcccaaaagatgtcagaaaaatatatagaagtctagtaaatttactatattatagagttatgataaaatagtaaaagtttagacagagattataggaaaaggttttatgttaaaagattttgggaagaaaattaagagcctgaggttagaaaaggggctgaccaaagaagctgtctgccttgatgaatctcaattgtcaacacggcagttgaccagaattgaatcaggacagtctacgccaactcttaataaagctgtttatattgcaggacgtttaggagtgacgcttggctatttaacggacggagaaaatgttgagttacccagtcgttataaagaactaaagtatttattattacgaacgccaacctatggcgaccaacaaagattagctgaaaaagaaacctattttgacgagatttttagtcagttttatgatgatttgcctgaagaagaacaattgattattgatggcttacaatcgaaactagatattcattttagtgacaatatcgattttggcgttggtattttaaatgactattttgatcagattttaagaaaaaccaattatcaggtcaatgatttgattctgattgatctctatttttcctgcttaactgttagtggtttggattcagctatttttgattcaagaaaatataatcaattattggagacattgcttaagcaggtagactgccttccattggaagatcttttcgttttaaataatgttttattgaataattttggactcctcttagaattgaaaaaatatgattttgttaagcagcttattgctgtcagcaataaaatcatggatagaactcatgattttcaaaaaaagcctattgttaatcttctgacatggaagcatcatttatttgttgaaaaagattatgcggaagctaaaaagagctatgatgctgctatcttatttgcccagttaacagaaaacattaatttaagagaaaatttggagaaagaatggcaaaaagattctcagaacgggacataaatgtcctgttctttttttgaaggatcatttataatgaatgatatcaaaaagaaaggagaataacaggatgttttcaattttaacaagtattttgatgggtcttgactggtggagcttataatagacagcccttatgtcagatgatgattttgagatagtgttaactcttgtgtttgctaacacggcacagtaataaaaagagaagcaaattcaatagacatatcacatttgactcaagataaaatcaacgaagtcttcggcatcagctgctgcattaaacttgtggtatcttgctcagataggaagactggatgaacaaaagttattaaatgagtctgggactaaagtcactaactaaaacagagactcacattacaatcacacgtgaatctctgtttttcttagctgagaaatctttttgtctcagactcatttgattgagtaaatctattaatggcatgctaaaaggtgtgatttctaataaatacacaccttttagtatatcttgtttttagaggatttaaattaacttatcagttcttatcatttggaggggttccgtttccaggaaaggctggatgatggccatttggaaggagcggaacggtatcttttgatacatgcctgcctgaaggatgagtggttgtgtcttttgttgctttgataactgctttatgaccatcagatgttgtaaccgtgtaggttttgcctgccttgatggttttatttgaaaagacaacatggtcaaagtctacatctgcctttgtttttgcaacgatatgcccttttgagtcagttatagtaatggtatcaccggctaatcctgaaacaatcgcagcaatataagcttgtttggttccctttgagaagccctgagcaaatcccatatggccaattgcccaagttgttcctccggaagcaaaccctgtaccatcataatcaatggctgagctgtaatcagtgattgattgaattttgagactaccatcggtaatatagagatttccatttgaatccacaccgtcatctttgccaataccgctgatattagcaccagaaataacaatagcaacctcattttcgatatctttcttgctgtttttcaaatgcgataggtcagcatcgtcttttgttgtccattcagtcgcgttgatagcatcatcaccagcattgatcgttatttgaccttttttcaaattcacatagcggccttcgattccttcagagccagatgtaattgttatgaaagttgaccctttaacggttatctcgtcgttcgctgtaattcctttacttgtagaggtaatttttacaatagaatctttgatctggatatcacctgaattgacatcggtattatcttcagcttgaattccatcatcttctgccgaaatggtaacatttgactttttaatggagacgtttgatgtggcattaatcccatctttagcagtagaagacagctctaaggttactttatcagcttctaaactgtttgctttgatagcgtgaccagctgtacttgtgactttcaaaccgcttttctttttgcttgaaatgtagagtgctcctcctgtttcgattgtattcttcaaagaagacgaaatagagctatcagataggactttaatatctaaatctcttgatgaataaagagtggagtcagtcaaattcactgcatcgagtttgagtttcactgtatcagtcactttatctgctactgatatgctgtagccgctggcagaccctgtaagggtataagttcctgctgatgtaatggtaatgttttttccatcaatgttcacaccagatgaagttgtttttacgcctgtgttgtcaaatttaatatctgctttttcagatttgtcatcttctttgtattcgttgacttcttcttcctcttcatcatcattatctttatcatattttgctgattctaaagcattgactgattgagacttaacttgagcttcattacttgttgtttcatcggaaagttcatcatcactttgatcggctgactcagaagctgttgcgtcattgtttgtctcagcttcattgctttcagaagcagcctcactacttgctgtgctattttctgatgagacagtctcagaagtaacttggctgttgtcactatcagtgctgtcagctgtctgagagtttgcagtgtctgtgtcagctgcagttgaggatgtggttgtgttgttttctgaagcagtaacgttatcagcagaagcaatttggctgcctccaagtaaaacaatagctcctgctaaggcaatacctgttacgagacctttggaggatttacgtttgacatcatgtcccttagcatttgagaaaacagagcgattaaaaagaaattttttactcattatagtttctaacccttctaaaaagtatgaatagcagttttcttaaaaacttattcaactttaaaaatataataaaaaagaatgataacttgatcattcttttttaccaccgttctattatatcaaaattcagaaaattcacaagggcgctgtcaaaacctgaattccgaacttttttaacggtttccttagatgataggaacggcaggatggcgcgccgccgttagggctctttagctagtgcttatctcataactaaactatttttctgcgaatgcagattcttagaaagatttgtgctattctgcttacttcgtttctgttataatagtcttatgactagaattttagataacgaacttatgggtgatgaggaatttgcagaacgcacacttcgtccgcagtatttacaggaatatattggtcaggataaggttaaagaccagctgaagatcttcatcaaagcagctaaacaacgtgatgaggctttggatcatgtccttttatttggtcctcctggccttggtaagaccaccatggcttttgttattgccaatgaattgggggttaatcttaagcaaaccggcggtccagctattgaaaaagctggtgatttggttgctgttttaaatgatttagagcctggggatgttctttttattgatgaaattcatcggctgcctatggctgttgaggaagttctttatagtgccatggaagatttttatattgacattatgattggtgcgggagaaacttctcgcagcgtgcatttggatttgccgccttttactttaattggggcgacaacacgggcaggtatgttgtcaaatcctttgcgggcgcgttttgggattacaggtcatatggaatattatacagatattgatttaactgaaattgttgagcgaacagcggatatttttgagatgaccattacccatcaagcttcgttagaattagcacggcgttcccgtgggactccgcgtattgctaaccgactcttaaaacgtgtccgagattatgcccaaattatgggagatggtcttattgatgataaaataacagataaggctttgaccatgcttgatgttgatcatgaaggccttgattatgttgatcagaagatccttaagacgatgattgagatgtaccatggcgggcctgttggtctggggactctgtcagttaatattgccgaggaacgtgagaccgttgaagacatgtatgagccctatcttattcaaaagggatttatcatacggactcgcagtggacgtgtagccactgccaaagcttatgaacatttgggttatcgttacacagaataacagtagtcattctgacaagaaaagttaaaggaatagcatgaagaaaatttgttttgtttgtttgggtaatatctgccgcagtcctatggctgaatttgtgatgagagaggcagcatccgatgcgagtctagagattgccagccgggcaacgtcaggctgggaacatggaaatcctattcatcgcggaacgcaagggatttttagaaaatataaaattgcttacgattcctctaagagatctcaacgaattagtttggctgattttgcttactttgattggatcattggaatggacgagactaatatctatgatctcaaaaggttatctcaaggacaatttgatgataaaatctttctttttattgatggtggtgtaccggatccttactataccggagacttcgaagaaacttatcatctggtcgaaaagggctgtcaaacttggttgaaaaaaattaaatagtacatcttgttatattttcaaattgtagtaaaatgacatatatgataagaaaaattgaaggaatatgatgagaaagatacagataacgagagaaaaattagagctgttagcagttattgtcatccttgtatgtggtttatctgttttcacccttaaatttggtagcaaagcaaccttaacttatgaaggtggtaagattaactatacaggctatgttctcaatcatcgaatgaatggtcaaggaaaactaacttatcctaatggtgatgtttatgaggggcattttgttaatggtattttcaacggtcatggtcgctttaagtctagcatgggctggtcttatgttggcgagtttaaaaaaggacaagcagatggtcatgggaaattaacggctaaggacaaaaaaatttataaagggacatttaagcaagggatttatcaaaaatgagaataaaatggttttcttttgttagagttacagggctgcttttggtgctgctttatcattttttccaacgagcttttccgggcggctttataggagtagacgttttctttaccttttcgggttatttgattacagctctactgattgatgaatttgccagaaataagatgattgatcttttaggctttctaaggcggcgcttctatcgcattgtaccgcctgttgtcattatggttttggtcgttctgccttttacttttttgattaggaaggattttgtggcagatattggccgccaaattgcttctgttctaggttttacaactaacctttatgaaatttttactggcagcagttacgaaagccaattcatcccccacctttttgttcatacttggagcctagctattgaagtgcatttttaccttttttgggggattcttgtctggttcttatcaaaaaaggttaaggatcctacgcaatttcgcggccttatctttttgatttcagttggtttatttttgctgagcttctttactatgtttgcgcgtgccttttttgttaatagtttttcgacgatttatttttcaactttgtcacatatttttcctttctttttaggagccatttttgcaacgatgtcaggaattagtgagacaacgaaacgctttaagaaaaatgtgcagctctggcagaccaaacgcgttgtctttttcatggttggcagtgcagccttgttatttctgttaggatttattcttgactttaataatataatcacttatttatttggttttgctttagccagtctattcacagctgtaatggtttattccagccgtgtcttaaatgaccaaacgccacatttgcaagaacctgcttttgttacttatttagctgatatcagttatggtgtttacctttttcactggcctttttatattatctttgggcaattaatgaataactggttggctgtcatttttacggttcttttctctcttacctttgcaacgatttcttattatgttgttgaaccttatattgcaggaaagcaagctgttttgtttgggctgactattcctattgagcattacaaaaaatggttctacagtttggttggtttattaaccgttgtgactttaggtattgcctttacggcaccaagtgtcggctcttttgaaacaggacttttagttgatgcgctcaaccaagctgataataatatgaatcggacacatacgctggctgctggagacgcaagtgctattagtgatatcactgttattggtgactcagttactttgcgctcaagtactgctttttctgaacttctgccggaagctcaggtagatgcggcagttagccgtaattttgggaatgcctatgatatttttaaaaatcatattgataatagtacattatcaaaaacagttgttttagcggttggagttaattcggttgaaggttacaaagataatattcaacaattcattgataatctcccggatggacatcgacttattattgtgactccttataatactaaagatgaacgtattccagatgttcgtgattacgaattagatttagcaaagaaatatcagtttgtcacgatagctgattggtatcaagcagctgtggcacatcctgaaatttggacagaatctgatggtgttcactataatgacagcagtgatgaaggtgctaaactttatgtcgaaactataaaaaaagccattcagacatctgcaaagcagcctgctaagggtgaaaaacaaccctagccatagtctttagaggggaggtcttgacttaaatcgaagcgcgagataaagaagaaagttgagatttttttcgttgttttgagtgtcttgtgctgattggatagacgaaattgattttagatttataggtgcttttaagttactaaagatgttagaagtaataacattaaaaaattgataaaaaagagcctgaattcagtttacaagagctcgtttctgcgttataattgtggtgacataagatgtgaggaatggaggatatggcatgtctgctttgttttatgataccttagcagcaatttggatttctattgctggcgtggatgctcgttggggtcattaatattttgtgaaggttgggacaaaagtgttccgacctttttattgtgcggtggtattagtttgatgcagcggttgattgaactttttgcctcttagtttttagacttaaaccttcaatagttcaggaaacgatgtgcttatctaatcccatgaacgtccgatcatgttgatacctaatccaatttgcgaaaggcgagacaacaaaatcaacatcgcagtttcattgcgatttaccattaccgatttttgactcattttcttttttaaataaatatgagcaaattgtctgataattatggtataatgcttaaaaaactatctataaaaagaggatgaatcatgacattagtgtatcaatcaacccgtgatgaaaataataaagtaagcgccagtcaggctattttgcaaggcttagcaagagatggcggtctttttacgccgacatcttatccacaagttgatttggattttgaccagcttaaaacggcttcctaccaagaagttgccaagttggttttatcagcttttttggatgattttacagaagcagaattggattattgtattgctaatgcctatgatgctaagtttgatacaccggtcattgcgcctttagttaaacttaatggccaatataatcttgaactttttcatggttcaactattgcctttaaggatatggcgctttcgattttgccttatcttttaacaacgtcagctaaaaagcaaggcattaataacaagatcgtcattttaacagcgacatctggagatactggtaaggcagctatggcaggctttgcagatgttccggggacagaaattattgtcttttatcctaatggtggtgtcagtaagattcaagaattacaaatgacgacacaggtaggagataatacacatgttgttgctattgaaggaaactttgatgatgctcagacaaatgtcaaaaagatgttcaacgatagtgacctgcgagcaaaacttttagagcacggtgcccaattttcatcggcaaactctatgaatgtcggacgtttagtgccacaagtggtttactacgtttatgcttatgcccagttgcttaagtcaggtgacattaaaaatggtgatagagttaactttacagtaccaacaggaaattttggaaatattttggctgcttattatgcacgtcaaattggtgtgccaattggcagacttatctgtgcttcaaatgaaaataatgttttgactgacttctttaaaacagggacttatgataagaaaagagaatttcgtgtaacaaccagtccctcaatggacattcttgtttcatctaatttggaacgtcttatttttcatcttttgggaaatgattctgttaaaacaaaagaactcatgcaggctttgattgaaaagggtgagtatactttagaaaaagctgataaagctattttagatttatttgctgcgggatttgcgaccgaagaagagacagccgctgagattaaacgtgtttataccgcttcgcgttatattgaagatccgcatacagcagttgcttcggctgtttaccatgcttataggaaatctagtggtgatcaaagcccaactgtaatagcttcaacagctagcccttataaatttccgcgtgtcgttgtttctgcagtcggaggtaaagatccaaaagatgattttgcagctgtacgtgaactgagtcgtttatcaggtgtatcagtgccaagggcagttgatggccttgaaactgctgaagttcgtcatcgaaaggttgtcgcgacagctgatatgcaaaaagcagtagagtcatatttaggaatttaacaggaggctggaacaaaagtgttccgacctttttattgtgtagtggttttcgtttaacgcagtagttgattgggatttttgcttcttggtttttagtattagtccactaaactgttggggtttatctagtcccatgaagctcagtttgtatcaatgcctaatccactttgcgaaaggtaggacgataaaatcaatattgctttttattatgatttacttattttttataggtaatcttatggatttggatttacactattttatggatagttacacagcaatcatagaagtctgtcctatcctctcatttataggaaggaagataaagaaggttaatgcttgaatgtgtgatggagagaaagttttaattgctttgctgaaaatacagcaaagactgctttttttctattgcttgaaaattcaataacatatgaaaaacctttatacataatcaagatgaatcaaagaaagaaaattgttcaacttgctttaccagctatggcagagaatttactgcaaatgctaatgggagttgttgataactatttagtggctcagattggcttagttgctgtatctggtgtttcggttgctaataatattattacgatttatcaggctatttttattgcacttggggcggcagtatccagtttagtggctaaaagtttaggtgaagataaccaagccagagtgaggttttatcagtctgagtctgttgctattacattaatgctgagtgtagtgttagggtttatatcttttgtttttggtagcaatatgcttcatcttttaggaacaacagatagtgtcacacaggcaggaggaatttatttagctattgttggcggtttagttgtcagtcttggcttacaaacgacgctgggtgctattttgagagcacaagggaaagcacgtttgcccatgtatgtcagttttctaaccaatattgttaatgttattttagcaactacagctatttatattggacattggggaattgttggagttgcggcagcaacagtcctttcacgttttcttggaaccttcgttttagcttgtcaattaccaattaaagctattttgaggtcaatgagaattaaaattgacaaggccttcctagctattgctttgccttcagctggtgagcgtttaatgatgcgagcaggtgatgttgttattattgctattatcgttaaatttgggacagctgcggtagctggaaatgctattggtgagaccctgacacagtttaattatatgccgggaatgggggttgccacagcaacagttatcttagtggcccataatttagggcaaggaaaaaagaaggtcattaaggaagtcgttagagaatcttatattatttctaccgtatttatgctgttagtaggagcatgcatcttttttggaggtaggcagctaacctatctttttacagaaaataaagcagctcttcaggcgaacttagttgtgttgttttattcttttataggggggccagcaacatcaggaactctggttttcacagcagtttggcaaggtctaggaaaagctaaattgactttctatgcaacgacggttggtatgtggttgattcggattgtgttaggttattatttaggtattagtttaaatcttggtttagcgggtgtttggttagcaaccttagctgataatgtttttagatggctgtttctctattgcttgtatagaaagtatatgcagggattcaataataacctatccagttcataacagccagcgataaggcttaagtaagaaagttggaacaaaagtgcttcgacttttttattatgcagtggttgattgaaaatatttatctaatttcataaatgtcgcttcgtgtcaatacctaatcaactttaggtaaaacaacacaattgatatcataatttcatgatgattttccctcttttttgactatttttctagaaagcaaggtaacagaaagaaaacggtgatagtcttattaaattttgcttcttaaaagaaagatagagaaaagtccgaacattatcattgtatttaatatagaactttcagcttttttatgctaaaataaaaaaacgtagaagatatttggaggctaatatgaaggcgattattacagtggttggaaaagataggactggaattgtagcaggtgtgtcaactaaaattgcagagttaggtcttaacattgatgatattacacagactgttttagatgagtattttacgatgatggcagtcgtatcttctcaaggaagtcaggattttgcacagcttaggaaagagtttgaagctttcggtgagaccttgaatgtcaaaattaacattcaaagttcagctatttttgacgctatgcataacttgtaagaataggagttctagtctgatggatattaaacaggttaccgaaacgattgcaatgattgaggagcagaattttgatgttcggacaattaccatgggaatttcgcttcttgattgtattgattcgaatattgaaaaagcagctgaaaaggtttatcacaaaattgtaaccaaagctggcaagttggttcaagtgggggacgatatttcagcagaactcggtattccaattgttaataagcgtgtatcggttacaccgatttcaattattggtgcagcaacagatgcgacggattatgtgcccttagctaaggcgcttgaccgtgcggcaaaagagattggagtgaattttatcggtggtttttctgctttagtacaaaaaggctatcaaaaaggggatgaaattcttattaattcgatcccaaaagctcttgctgaaacggactttgtctgttcatctgttaatattggttcaaccaagtcgggaatcaacatgacagctgtccgcgatatgggacgcattattaaagagacctcagcggcttcagaaatgggaccggcaaaattggttgtttttgccaatgcagtagaagataatccttttatggcaggagcctttcacggtgttggggaagcagatgttgtcatcaatgttggtgtttctggaccgggtgttgtcaagcgtgccttagaaaaggttcgcggtcaaagttttgatgtggtggctgagactgttaagaaaacggcttttaaaattacccgtattggtcagttagtcggtagcttggctagtgaacgtcttggtgtcaaatttggtattgtggatttatctcttgcaccgacgccggctgtcggagattctgtagctcgtgtgcttgaagaaatgggactggaaaccatcggaactcatgggacaacagcggccttggcactcctcaatgatcaggttaaaaaaggcggtgttatggcttgtaatcaagtcggtggtctctcgggtgcttttattccggtttccgaagatgaggggatgattgctgctgtgcaggagggggctcttaatctggaaaaattagaagccatgacagctatctgctcggttggtcttgacatgattgccatcccggcaaatacaccagatacgacgattgcagccatgattgcagacgaagcggctatcggtgttatcaatcaaaaaacaacagctgttcgtattattcctaaaggtaaagagggggatatgattgaatttggcggtttactcggttatgctcctgtcatgccggttaataaaaaatcatctgcagactttattgcgcgtggcggacagattccggcacctattcatagctttaaaaattaagtagagcacttgcaagtcttttgcaagtgttttcttttaatgttataatataggctagattgggagagaaaaatggcagaaacaagactctatatagctagacacggaaagacaatgtttaatacaattggccgtgctcaaggttggagtgatactcctcttacacaagcgggtgaagaagggatacgggaattgggaattggtttaagggaagcccgtatcccttttaaagccgctttttccagtgacagcggcagaaccatgcaaacaatggagattatccttcgtgaaacgaataatgagaatttgccttatgtacgagataaacggattcgagaatggtgctttgggagtctcgatggaggatatgatggggatcttttccaaggtgtcttgcctcgaacagcagcttttaatactggcaaatcctttgaagaagtgacttaccctgaattagcagctagtatcgttgaagtggacacagctaattgggctgaaccttggcagattcttagcaaacgtatttatgatggttttgaagctatggcacaaacagttgaacaatctggaggcggaaatgctattatagtcagccatggaatgactattggtacttttatgtggctgatagatcataagcaggaaaaagcggctattgataatggcagtgtttctgttgtttcctataaagataatacgttttctattgaaacgattgcagatatgtcttatcgtcatcaaggaagaaaaattttggaagatatttatgaagagaaattctagtttattaacaattgtgctgcaaataggtattatctttgttttcattttgggcatttatctttttttacataaaggtaaacaaggggcacaagaaaatacggtagggaacaaaacgcagcaagctgctgagacaaaaaagagcaaacaaacagcaggcttaccaaatgtttcagcaaatgattgggagttagttttggttaatcgtgatcatatcactgctgaaatgaaccctgatgtaactgatattgatggtgttaaggtggattctcgcattgcagaaaatacaaggaaatttttagcagctgcgcaagaaattgactccagtgaacatttgatatcaggctatcgtagtgttgcctatcaagaagaactctataataattatatagctcaagaaaaagccaacaatcccagccttagccaagaggaggcgcaaaaacaggttcaaacctattctcagccgccgggttctagtgaacaccaaacgggactggctattgatatgagtacagttgacagtcttaatcaaagtgacgctaatgtcgttgccaaggttgctgccattgcgcctaaatatggttttgtccttcgttttcctgaaggtaaaaaggatgctacgggtattgattatgaggactggcactatcgctatgttggtgttaaatctgctaagtatatgaccaaacatgatttaaccttagaagaatatttaaaaaaattaaaggagaagtagctcatgagagcaagactcaaatttaagtcttttgttgtaattgttttacttcttttgctggtgattttgctcccaattttggcgagtggaggattggccgatgctaacaaaaaaatgccaagtccttatagtcataaagagtttgtcaaagaaattgctccaacagctcaaaagttatcaaaaatctatggcgtgaggagttctattattattggacaagcagcgctggatagtcattttggcagtactttgctagctagtaaatatcacaatctttttagcattgaagcaagtccaggtcaaggagctgttcgcttaaaaagccatgagtacaagaatgggcgttggcaggaagtgacaaatcgctaccttgtttatgaatcttggaaagaatccctttatgattacatggctattctacatggaaataaaatttgggataaggcactgtatacaacgatgatgacttctagtggttataaaacagttgcaagagccttacaagcagctggttttaatagtgatcctaactatgcagacaagttaatagctgttatagaggaaaataatttaacagattatgataaataggtattctaaaaaatggttgagtttattagttttggataaagatatctgactgatgaaacagcatcgtttagaatgctttttttaattgttttcaagctatattcttcaacaatcaaaatgattgttgtcttgatactaacagcttcgctgtctccgtttcccacctcaaagcaaaaggttttccagatctttgagtttcctctgctctccaatattgttttataggtggttgtgatatgtgtttgagcagtcaataataagatttaatgagacagtcagacttgtcactagcggctaccattaattaatgagacacttagcacctattaactttgccgccttgcctaatctatttttttgatttttattgagcattaatgacatctgtcatattaaggaaatgacaattgctagatggaagatagatagtgatttggtatactgaggataagatagcgcttacaacattttaaataaatttttgaaacttaaatactgaccgacctaaataggaaagaaatgaggtattaaaaatttttgagcagccaatttttatggctgtctgtttaattagagtttgtcagtttcataaatttgaaaaggagagcaaggaaatggaagaagaaacagtttgtaaaaattggttcatgcgtaaaagtggtaaaagctggatttttggctgtgccgtcttttttgtgttaggtttggcaactgctttaccggtggcagctgaagaaataagtcaaacaactgctgctgatactgctgttacagaagtaagaacagaagacagcagccagacgtcatctcaagaaaccgcagttacagaaatgactcaatctgaggaaactgcttcaaaacaactgacaactccggcggtagcagatcaaactacagagcctactgataatgaacccatcagttcctctgatggtgcgagcagtccttatcaagtgactgacacgacagaacctcaacaaactctcactcctgctgactctgaacctcaagcaaaggcggatgttcaacaagcagcagctcctaagaaagaagagatcaaccctgtgaccaatttagaagatatgtcacatgatacgaatgggacttgggaagtacgagaagatggtattcattctaatgccattggtaaaggtgattctttcttgtattctcagtcaagtggtaagaattttgtctatgcaacagatgttacttttaaacaaaacagcggtgcagcagctcttgtttttagaagtaacaacgatagcaataacaaaaatatgtatgcggtcaatgtggatataggcggacacaaggctaaattttggcgttgggttgacaataaagatatccaattaattgatgaacgtgatgtggtaccgacagctgataaccgctatactcttaaggttgtggcggttaataactggatttcttattatgtcaatgatgttttgatggctagcacaggtgattatgtccttcaaaaagctgataaaggacaaaacactgtcattcctgagggacactttggtcttttgaattggaatggcgatatggttttccaaaatacaaaatttgccctattggatgatacaacagctccgttgattgataatattacagtaaggtctgatagagggaatgtcgaaaaacaaggccaattcttctctgaggaaccccttcatattcaatatgttagcaatgatgcctctcaagtgagcttggatattgctaaacataatcctgcagctactgtcacagtagaagataaaactggtcgtgtttacacagatccttctcatcttccagttaatgtaggagctaattatttcactgttaaaagtacagttattgattcatttggtcgtacagtaaccttgacttatcgtattaatgtccaccgtcggcaaaatgacgaagtctattataatgaactttaccgcgaccaatatcactattctgtaaaagacggctgggctaatgatcctaatggcttggtttattacaatggtgtttatcatctcttccatcaattttacgatgatacgaaatggggccctatgcactgggcgcacgcgactagtacggatttgattcactggaaagaagagccaattgctttttacccagattcaaacggctacatgttctcgggctgtgtagtggttgacgaacataacagttcaggcttatttaagacggctaagggtggtttagttgcgattatcacagctaatggaaatggacagcgcatggaacttgcctatagtgaagatgaaggcaagacttggcagaaatatgacaggattgtagccgattggtcaaatgacccattgcaaaatcaggattttcgtgatccaaaagtttttcactggaataaccaatggttcatggtactagcagggggtccgcttcgcatttattcttctaacaatttgaaagattggaaagtggagtctacttatcctgatcttcatacagaatgtccagatatgtatccaattgttgctaatgatggtgtgcttaaatgggtgttgtctcgcggcggtcgtttttacaaggttggtgatttcaaacaagtagatggtaaatggacctttatagcagatgatgcttataaagataaggatcaggtcatgaacttcggtaaagattcttatgccgccatgacctactatgtacacgattttggtacagaaacccgaccaaccattcccaaattaacagaagtcaactggatgaacacctgggaagattattgtaatcttgtagcagatacagttggacaggactttaacggtacgtttaatttaaaccttgatcttggccttatcaatgaaaacggtcagtacatcttgacgcaaacgcctgttaaggcctatgatagtcttcgtgatgtgaatactgccttgcatttcaaagatgtgacagtagacgctaataatactcttttgaaggacttcaaaggagacagttatgaaattgtttctcatttccgaccagatgagaagaccacaaaagtaggcttcaatcttcgtgttggcaatggtcaagcaacgaaagtgatttacgacttgcagacagaaaccttgtctattgaccgtagtcagtcgggtactatcttatctgcagcttttgcaaaagttaatagtcagcatgtgactaaaaatgcagatggctccattgatttgcatatttatgttgatcgtgccagtgttgaagtcttttccaaaaataatacagtggctggtgctaatcaaatttttcctaatccagaagctgtaggtgccagtattattgtagaaggcggcaaagctcaagcagatatctctgtttatcaaatgaaaacgatttggacagataagaaagatacggcaaaaccggtggctatgaacacaacaactgcgaaagagctagcccttcaagttggtcaaagtcaggatctgcaagtctatctggcaccagcaagtgttaggcaagatgtggaatggacgatcagtgatccaagtcttgttaggacaagtcaaaaaggtaatgttcttcatttgaccgctgtgaaaaaaggaaagcttaccattacagcaatttctaaagaaaacccaagtctcagtaaaacctttacaatcagtatcaccttaaataatttcaagactaacctcaaaggttcgcagtctgttactggtaagtggtatgttgatgatgaaacgctctatgatagtaatacaagttcgaatgattactatatggcttctcaaaaaccgggtttcaaagaatatgattacgatattgatctcaaatatcaacgtggtttaattaatctttttgttgcttctggcaatattgatccgagtcaagcatattctgtacaatttggtgacagtgagactgttcggctttaccgttttgctggtgatactattgcagaagctaatatgggtaaacgaatcaatgatgatcaataccaccatattaaagtcacaaaaacaaaaaatagtataatcatatcagtagatggtcaagaagtgatgagtcataactttgatcaggtggactcatactttaatgatgcttatgtaggtctcggtttgtgggacggagctgttgaattccaaaacttctttgtaacagatcatgcgactactcccaaaccagattctgatccgacaccgcaaccagatgcaccagaagcattggctcaagaaagggaattgattgaccctgcaactggcgtccgtgtcattcttcaaaaaggggagctagcttctatcgttagagtaaaggtcagccatatcgaaacgaatgatgctcatacaccagctgttctaaatgcaaaagactatgatctcttcaatattacacctattgataaaaatgagaaagttgttgctattacgaaaccagcgacagtcttattgccaattgatgctggaaaagtggtagataaagtggtgtatttaccaaatacggacaaagaagaaagccttccatttacgattgtgagtttgacagatagcaatggtaagaagcaaagttatgttcactttacagcagaacactttagtgaatacggcttagtctatcaagcagaaaatcaaacaaaccttaagagtaaagaaaagcaagacaatgttgctatttcttatccattaaatttagaacaagaagttaaggtttcatctatttcacgaaaatatgctgcaaataagacagcagatgtcaatagtgttcaacaaacagaaccttcagtaatgagttcttcatctaaagcagcgctgccagatactggtgatcataagacagatttaagtcaattaggagtgttggcaatgattggctcatttcttgtagaaatagctggctatttcaaaaaacgcaaggattgattaaagtaaacctctagattttgacgcgtctagaggtttgtttttggctaacaatagatagaggtgtcttatgctaaagaaaaaattagtttgtttattaatcggtttaattgcttttcttggctcccttaaaatttacgctggaagcagcgaaagtgctgagtatcagcaaaccaatcattataatacacctaaaggatttatgaatgatattcagacgatttttaaggggagtgatggttactaccatatgtattatttgttaaatagtaactataaattggcaaatgatggaacagaatggtaccatgtgagaactaaagattgggagcattttgaaaatttaggagtagctattcctaaatttgttaatggttggtcagcagtagcaacagggtcaatttttcaaaatagtaatcaatttttcaaagatttacctaccagtgcgattgtagcctactttaccagctatactgatacaggtcaacatcaatatgtcgcttattcgttagataatggcagtagctaccagccttacaataatggtaagccagttatgacttcacaaacaaaagagcaaaatgcgcgagatccttacatttggtatgattctaattccaaaaggttaatgatgtacctagctgagggtgataaaattggaacctatgctagttcagatgggaaaaattgggcttatcaaggagcgactgtcctcaatcaatataccttagggggaaaagacttaggtcttgtggaatgcccaaatttaaaaactttttatgattctgccacgaatacgacgaaacatgttctcttttttggtgcaaatggttaccaatatggttcgacgacaggaacttattatatggttggtcatttagatactcaaggaaattttgtgccagagcaaaatgcagaacgtttggatcaaggctcagactattacggtgccaacttttatcaagaaagcgatcgtgtcgttaagagtatagcttggatggggaattgggattacctgcaagggcagattcttgatgatcaaggccaagaatccaaacatttaggttccgttagttcagctagagatattacaatggttaaaagagatgataaatatgttttggagtcttaccttaaaaataacaactctaggacaaacactgttagctaccaaagcaacgctgatacggcaaaacttgctgatgatggctatcataaaactttattatcggtatcaagatggcattcacaggaactatctttgaaatttcaagctaatgctgcaaccctaaacggacatattcgtttaattttcaaacaagcagatgcccaagtgtctcttgactacaatactgataatggttactatgaggtaaaaagaaccagttctaaaataattggcagccaaaaagtgaattatgaacgctcatatgttgttgatagccactggaatgggcaaaaggaacttaatatttatctcgtagctgacaaaagcagcttggaatttgctctgccgaatggtcagacctactccatggtcaaattgtccactgccagtgatatggatatcgttattgagactagtggaagcaaccgtttacaggcagatttagctaatttggaaacgtaacagcaataaaactaagtcttaagtcggatttttagcactcaagtagaaagagtgctaattttttgtgtttttctcttgacagaaattaggaatggagtataatggaattatgaagttagcagtcgtctgttaagagtgctaactctattgattaaagatgggaggtggacttaggtgattacccagcgtcaaaaggatattctcaatttgattgttgagctttttaccaagacacatgagcccattgggtctaaaacactccagaattcaattgcatcaagcagtgctaccatcagaaatgatatggcagctttagaaaaattaggactcttagagaaggcgcacacctccagcggtcgtttgcccagtcaagaaggctttcgttattttgtggaacattctttgaatccagacagtttggacgaacaggatgtttatcaagtcattaaggcatttgattttgaagcttttcgtttaggggatcttctacaaagagccagtgatgttttggcgaatctgactggctatacagcactgattttggatgtggagcctaaaaagcaacgtttgactacttttgatattgttaagcttagcaatcatgatgctttagctgttttgactctagatgaagccagtcctgtaacggtgcaatttgccattcccaaaaattttttggacagcgatttaatgacagtggctaaaatagctcgggaacgttttttaaatcaaacggttctagatattcattatcgtttacgaacggagctgccgcagatcattcagaaatattttccacgaacggacaatgttttagatctatttgatcacatttttaatcccatttttcaagaagaagtttttatctctggtaaaattaaaactttggaatttgctgggcttgacacttatcaattcttggaaaatctacaatcagtagctcttgaaattcgtcaaagcctacctgaagatgaacttcatcgagttcaagttgctgatagtaaagaaaagagtttagcagatttaacagttatcagtcagaaatttcttattccttatagagggtttggaattttgaccgtaattggtccagtagatttggattatcaaagaacaataagcttgattaatgttattagtcgtgttttagctataaaactaggcgatttctatcgttatctcaatagcaatcattacgaggttcattagggatgatttgtatcttaaaatataaagaaagaaggtaaagccttgtcgaaagaagataaaaaagaagagatcaaggaagaagtagaagcaactgagcctacaactgaagagtccgtagaagaagtcgctgaagaaacttctgaaaacaaggagttgcaagaagcacttgagcgagctgaagattttgaaaataaatatttgcgtgctcatgctgaaatgcaaaacattcagcgtcgcgctaatgaagagcgacaaagtttgcagaggtatcgctctcaggatttagccaaagctatcttgccttcacttgataatcttgaacgtgctcttgctgttgaaggtttgacagatgatgtcaagaaaggattggaaatggttcaggagagtctcattcaggctttgaaagaagaaggtgtggaagaggttgaacttgagaattttgatcctaatttgcatatggctgtgcagactcttgatgcagatgatgaccatccagcagatagtattgcacaagtccttcaaaaagggtatcagctccatgaacgtttgttaagaccggcaatggtagttgtctataactaaaacaatttgtccgaaacgacagtaaactatgaaaaaagttaaaaacatgagctcagctttgcctacagtgagcgaagcgaactacagcgatatttcccgatgtggtgaaagtttcagtagcttgcgctactggaacaaggggattttttgggacttcagtctcaaaaataagtgatgaaatcccgaagggagttgctcatatccccaccactaagggaaatagcaaaaaagaaaaatatttaaagaggaattaagaaaggatttgaacccgaactaatacttcggaaaatagataaaccgcctagcactcattgaatgcgtcgttggtttcctaattttcagttgcattttcggtgttcttggtatcattattatgtctaaaattattggtattgatttaggtacaacaaactcagcagttgcagttcttgaaggaactgaaagcaaaattatcgctaatcccgaaggaaaccgtacaactccttctgtagtttcatttaaaaatggtgaaatcattgttggtgatgctgctaaacgtcaagcagtgactaatccagaaacaattctttccatcaaatctaagatggggacttctgaaaaagtttcagctaatggcaaagagtatacgccacaagaaatctcagctatgattctgcaatatttgaaaggttatgcggaagattaccttggtgaaaaagtcgaaaaagccgttattacagttcctgcttactttaacgatgcacaacgtcaagcaactaaagatgctggtaaaatcgctggtcttgaagtagaacgtattgtcaacgaaccaacagctgcagcacttgcttatggccttgacaaaacagataaggatgagaaaattttagtcttcgaccttggtggtggtacttttgacgtatcaatccttgaattaggtgacggtgtctttgacgttttggcaactgctggagataataaacttggtggtgataactttgaccaaaaagtcattgattggttggttgaagaattcaagaaagaaaatggtattgatttatcaactgataagatggctcttcaacgcttgaaagatgctgctgaaaaagctaagaaagatctttcaggtgtaacatcaacacaaatcagtttacctttcattaccgctggtgaagcaggaccccttcatttagaaacgagcctttctcgtgctaagtttgatgatttgacacgcgatctagttgaacgtacaaaaactcctgttcgtcaagccctttcagatgctggtttgtcattgtcagaaattgatgaagttatcttagtcggcggttcaacacgtattccagctgttgtagatgctgttaaagctgaaactggcaaagaaccaaataaatcagtgaatccagatgaagttgttgctatgggggctgccattcaaggtggtgttatcactggtgatgtcaaagatgtcgttcttcttgacgtaacgccattgtcacttggtatcgaaacaatgggtggtgtctttactaaactcattgatcgcaatacaacaatcccaacttctaaatcacaagtcttctcaacagctgcagataaccaaccagccgttgatatccatgttctccaaggggaacgcccaatggcagcggacaataaaacacttggccgtttccaattgacagatattccagctgcgcctcgtggtgtgccacaaatcgaagtcacattcgatattgataagaacggtatcgtatctgttaaggctaaagaccttggaactcaaaaagaacaaacaatcgtcattcaatctaactcaggtcttactgatgaagaaattgataaaatgatgaaagatgctgaagcaaatgctgaagctgatgctaagcgtaaagaagaagttgatcttaagaatgaggttgatcaagctatctttacaaccgaaaaaactatcaaagagactgaaggaaaaggtttcgatactgaacgtgatgccgctcaggccgctcttgatgacttgaagaaagcccaagaatcaggtaaccttgacgatatgaaggctaaacttgaagcacttaatgaaaaagctcaagctcttgccatgaaactttatgaacaagctgctgccgcccaacaagcacaagcaggtcaagagggagctcaatcatctgattctgattcatcagacaagggcggcgacgatgttgtagatggagagtttacggagaaataaaatagttcagtggactattttatcccgagcttgaaaatcaggagagtgaggtagttaagaatgactaattactaaagtgattgtctttctctacagcaattgttatttggcgaatgtcccaaacgtcttactagcctgattttcgaaaagtatcatttcgaaaatctcacgtcatgactataagcccaaattaaattcagaggttgcaaaccagcctctgtttttggaatatggctgatgtaaaaaggaattgctgagttgatcagcacaagtcctcaaaatattacaaccttctaagtttcaaagaaaggaactgaacccgatcttcaattcctagaaataaaaatagcggaaaggaaaagtgtttgtaactaaacacaggcgttaggttggtgcattctaatcattttgaatgaaactgaatacgcctacgactctgtgaaaaagagaaatacctcctagataccctggtatcttcgttggatttcttatttttctttgagtcgcttaacggcttaatatcttatatgaacaatcaagaatattatgatcgtcttggtgtctcaaaggacgcttcacaagacgaaattaaaaaagcctatcgcaggatgtctaaaaaatatcatccagatattaataaagaatcaggtgcggaggaaaaatataaggaaattcaagaggcttatgatacactaggcgatgaacaaaaacgtgctgcttatgatcagtacggtccagctggagctaatggcggctttggtgatggtagtggttttagtggctttgatagttcgggctttggtggttttgaagatatcttttcaagcttctttggcggcggagcctctaggaatcctaatgcaccccgtcagggtgatgatcttcaatatcgtgttaatttacaatttgaagaagctgtttttggaacagaaaaagaagtgcactataatcgtgaagcaagctgtcatacttgtaatggctctggagctaaaccaggaactagtcctgttacttgtagcaaatgtcatggttcaggtgttatcaatatggatacccaaacgccacttggtatgatgcgtcgtcaagtaacctgtgatgtttgtcatggaacgggccaagaaattaaagagccttgtccaacttgtcatggaacgggtcatgaaaagcaaagccataaagtttctgtcaagattcctgctggtgttgaaacaggccagcaaattcggttggcaggacaaggggaagctggctttaatggcggcccttatggtgacctctttgtcattatcaatgtcctcaagagtgataaattcgaacgtgatggttcaaccatttactatagtatggacattaattttgttcaggctgcacttggtgatactgttgaagtaccaacagttcatggtaatgttgaactcgctattccagcaggtacccagacaggtaagacattccgtctcaaaggtaaaggagctccgcgtttgcgtggaaatggacagggagatcagcacgttactgttaatgttgttactccaacaaaacttaatgatgcccaaaaagaggccctgcaagattttgctaaggctagtggtataaatcctgttcatcctaagaaaaaaggtttctttaataaagtcaaggacgcttttgatgagatgtagaatgtgttaatataagagcaatcgtagttggcttgggcatagtcattacgattgcttttttatttctcataaaaaatcggcgaatcctaggtaggacagaataggcagtcacaggtgtaagttagcggcagatagtatgataattggcagtgatatccacagcagttgctatgttaagtatgtaaacaagttaagctaaattaatgctttgattaaaaagaagatttaaccaactctgtccccatacaatttttctgattgtgtgttgttcttagataattgtcatgctataatttttcttatgatacggtataaagcgattatttcctatgatggcactaatttttcgggtttccaaaggcagccgcaggtgagaacagtgcaagaggaaattgaaaagactcttttacgtttgaatagcgggcaggctgttaagatacatggggctggccgaacagatgcgggtgtgcatgcttatggtcaagtcattcattttgatttgccgcagcaaagggatttagaaaaactgcgttttggccttgatacacagacaccagatgatattgatgttattcaggttgaacaagtagcagatgattttcatgctcgttaccaaaagcatcgcaaaacctatgaatttttagtagatttggggagacctaagaatcctttgatgcgccattatgccacccattttccgtataaagtggatttttcagttgttaaagcggctattaaaaaattacgtggaacccatgatttcactggttttacagcgtctggtactagcgtggaaaacaaggttagaacaatcagccgtgctactgttgaaaaagacgacaagactggatttctcatttttacgtttacaggaagtggttttctttacaaacaagtcagaaatatggttggaaccctattaaaaattggcaatggccgcatgccgattgaccaaattgacagaattttagaatctggggaccgcagtctagctggtccgacagctgcaagcaatggactttatcttaaggagattatttatgacgactaagtatattttagctatttcaggtaacgatatttttagtggaggtgggcttcatgcagatctagcaactttcacaagccatcatttacatggttttgtagcagtgacttgcttaacagcaatgactgataaaggctttgaagtgtttgcaacagacaaagctgtttttggccatcaactcagtagtctcaaagatgtgccgctttcaggtattaagcttggtcttttgcctaatgtggacatagcagagcaggctttggattttgttaaggtacatgacgatcttccagtagtacttgatcctgtcttggtttgtaaagaaagtcatgatgtagaggttagtgctttgagggatgagctcttaaaatttttcccccatactgctgttattactccgaatttggctgaagctgaattattgacgcaaatgccgataaaaaatcttgatgatatgaaggcagctgccaaatgcctttatcatttaggtgctaaaaatgttgttgttaaaggaggaacgagactgagttcaaaacgagcgatagatgtcttttttgatggtgaaaagatggaagttttggattatcctttgctggcaaataacaatatcggtgcaggctgtacttttgcatcaagcattgccagtcaaatagtgttaggtaagtccgttttagaagcagttaaagtatccaaagaatttgtctatcaggctattcagcattcagatcaatacggagtcaatcaacattatgaaaaacagtaatttacaagaaatcagtcttttagctgtcttaacagctttaagcgttgtttttgggttatttattaaaattccgacaccaactggctttttaactttattagatgcaggtatttattttacagccttttatctaggctcccaagaagctgcgattgttggtggtttatctggttttttaattgatttgattgccggttaccctaattggatgtttatcagttttttagcgcatggctcacaaggttactttgctggttggactgggaaaaaacaatttttaggtctggctttagcttccctgtctatgattagtatttatttgctctgttccattcctatgtatggattaggagcttcaattgccggtgcttggggaaatattttgcaaaacttttttggtatgtttgttggttatacgcttagccttgcctataggcgcgtgaagccttgatcatctctgatttagtgatgataaacgaaaataaagaggttgaaaatggatttagaaaacttagccgaagaaacgagaattgttctagcagatctgattaaacgaagcgacatcaagaaaggacagatttttgttttaggtctgtccagcagtgaggttgccggtggtgtaattgggaagaattctaatcttgacatcggagaagttattgttaagacgattcttacttatctcaatgacagaggaatttacctagcggttcaggggtgtgaacatctcaatcgtgctcttgtggttgaacgagagttagctgataaaagaaatttggaaattgtaaatgtcctgcctaatcttcatgctggcggcagtgttcaactagcagcttttaaatacatgaaagatcctgtggaagttgaagaaattgtagctgatgcaggtcttgatattggggatactgctattggtatgcacgtgaaacgcgttcaagttcccttgcgtcctctcctaagagaactggagggtgctcatttgacggctcttgccagtcggcctaagttaatcggcggcagccgtgctagctatcagccagatcctattcgtaaattttaaaattgtaaaaatgaatttggaaataagaataagcataaagccctcattagaaatcattctaatgagggcttttagcgtttgtggtctgttttggaaattattatcaacggtagtggtaggcgtttgacctacatttattttctaattgttgatttgtgataatagccttcttattttttagcaatagggatggcattagctgttggcagggaaatatgatttgccagcaatgcttcttgatagaggcgataaaaagtatagtaaatatgattttgcttgctattttgaacaaaaatatctattcgaaaaacgatttgacctgtgacgggagaggtcgttgctcccaagatattaggaacaccaacgatttcaggaaactgactgatattgtcttcattgacttgcttgataatagtagttacttgtctaagattagtattagcatagataggaatatctatctgtgctcgcatatcaccgcgtgataaattactgacgatggtaatattgcgattggggacgaaatgcagagtgccatcaaaatcacgaatttgtgtggttcggatgccaacactagagactgttccagagattgaacccgttgttgctcttaatttaacggaatctccaacatcaaactgacgttccagcaaaatgaaaaagccatttaccagatcggaaaggaatccttgagcaccaagaccaatagccacccctgcaatacctgcaccagctagaaggcttgaaacaggcagaccaataatagctaaaatccaatatatcaacagaaaatagagactataatccatgatattatgaaaaagcttaatcaaggtcttttgtcggccttggctatatctagctagagcagtggatcttgcaattgttttttcaaaaagataactaataactcttttagcaataataaaaacaatgagtagaagcagaagggacaatagttttgacgcaaattcaaataagaggttttctaagttaaaatggccaaaataagaagtaatcaatttcataaatttagtttatcaaaaaatgaaaaaatagggaaatgtgaatcctacaagaattaatttggctctcaattctgcttgagatgggaaatgggagcaatgaaattgacttcatcagtacaataacatatcataaggctttcaaagcagattaataaaaacaataacacctttgaaagccatgaatcaagttattatgcctactggcttatttaataggttattgttctttatgcggcgttttagtctgattaagccaagcataagccagaccgataaagatgccgccaccaatccagttaccgaagaaaacaataatccattgacggataacattgaaaaattcaagtcctttaatgtgttctacagaactaaaagctgccagcataaatgaggcaaagttggcgatcaagtgttcgttgattaaaaagacaaacataaagatagccgaaagagcaatagtaattttggcactttcttctttaagaagcatgtaccctaaaatcgcaatattgacaaacatattggctgtaatgccttcaaagaagttttgccaatcgctcttagctaatttggtttgaacggcattaactaaaaagcttttatgtgtcaattgagcaaaagagaaagattggttaaagagccaagctaaaatgttagcaccgattaaattgaaaaaagtacatgtcaataaaatggttatggctttcttgaaagagatgtgtttgtagtaagctcctgaagagagaaacatcatgtttgatgtcgctaactcaccattgaagagcaaaacataaaccaagccgaaactaaaaataaaagcaaaagcaaatcgtccaaaggcaagtgagaattgtgaaataacatcggctgcaactacaccgactgcagtactcattgtcaaataagcaccagcaaacatggaacacagagcgtaacggccaaggttttcatcaaaaagtgcctcttttttgcgacaggcggaagcaattttttcataaaaagtgcttgtaatagttgtatcagtcataaatagtacctttctaaattttaatttgttattttttaggataaatttgcttatattataccttttttaaactaaaatgaaaaggatttcataaaaccctcttcttttatgaaagaaactaactttaattgctattttcagagagtttggaagtttttcaaaaagaaaaaaacttccaaattagcaataaatatgatacactggaaaggcaaataaattttaaggagaaatgacttcatgtctacatcatttgaaaacaaagctaccaatcgtggtgttgttacatttacgatcagtcaagataaaatcaaaccagctcttgatcaggcctttaataaagttaaaaaggatttaacagcaccaggtttccgtaaaggtcatatgccacgtactgtttttaatcaaaaatttggagaagaggctctttatgaagaggctttaaacagtattttaccagcagcttatgaagaagccgttgctgaattaaaacttgatgttgtcactcagccgaaagttgatgttaagtcaatggaaaaaggtaaggattgggaaattacagcagaagttgtaacaaaaccagaagtaaagcttggagattacaaaaatcttgaagtatcagtagaagaatcaaaagaggttactgatgcagaagttgatgaaaaaattgaacgtgaacgcaataatttagctgaactggttcttaaagaagatgcagcagttgaaggtgatactgtcgtgattgactttgttggttcagttgatggtgttgaatttgatggtggtaaaggcgataatttctcgcttgaacttggttctggtcagtttatatcaggttttgaagatcaattggttggcaaaaaggctggtgagacagttaaggttaatgttactttcccagaagattaccaatctgctgatcttgcaggcaaagatgcaacattcgtaacgactattcatgaagttaaggccaaggaagttccagaacttgatgatgaattggctaaagatattgatgaagaagttgaaacattggatgaactaaaagctaagtatcgtaaggaactggaagctactaaagagactgcatacaatgatgctgttgaagcagcagctattgacttagcggtcgctaatgctgaaatcgttgaattgccggaagaaatgattcatgatgaggtccaacgtgcgatgcaagaattcatgggtaatatgcagcgccaagggatttcatcagagatgtacttccaattgacaggtacaactgaagaggatcttcgcaagcaatacgaagcggatgctgacaaacgcgtaaaaacaaaccttgttattgaagcagttgctaaagcagaaggctttgaagcgacagatgaagaaattgaaaaagaaatttctgatcttgcaacagaatacaagatggaagctgagcaagtgcgctctcttctttcaccagatatgctcaaacatgacattgcaatgaaaaaagcggttaacgttattactgattctgctaaagttaaataaaaaataaaagctagatgggagaaacatctggctttttgagtgcaaaaaatgtgattttttatgatctaatgtattaaggataatatacccgtggtgctagtaaaaatcctaggctataagcaaagataacctgttctaatcaaagccccaaaccttctaaacttctcactaatggtctttccatatcaaactcagaacatagaactgagaattgtgtttcaatggttagtctttcggctttgatcctcccctgattatgctgtttagcttttgccatatttgagtccaaaaacagtagcctttctgtgttagagattgttttaaggcctcactaagggaacctcagtcagctaaaaaacgggaaagattgtgttctcaagcagttcttcggccactcagatgctggtgtcacgacatagttcaaataaatcctgacaggtcaccagcgtatgggctttaaagccgtaaaaccacatctcttttgaaggattataggcaacagccaaatacgaaccttataattgcgagctggcgaacaaacggctagcggaaagctatccatgatgacgatatcgtcctaatcaaatggccccgtcatgccttgataaattcaccttaataaaggaataagataccgagctcttcggtagaatcgggttcgctctcgctctaagccggttttcacaagcaacacttgacatagtcaataaaatcagtattggaatttgctgtcaagttcaacttgaagcgctaaaaggacaagaatggagctgttgctaattttacaatgattgatatttcgacgctgcgccagttctgtagaggcatagcgtcgataatagcaagaaaacattgcctttaattgtttcataactagcaccatggataataatatgataaaaagcagcgttcatatcttgttttgtgtttaaaaaacctgtatttcaaaaaaagagaatgtagaaaaagtcttcttttgagactttccttaggtgatacggacggtagcgacttccttcggaattccatacctaagatttgagcctaaggtctcaaatcttccgagtgcctgaaactttaaagtttcaggcacttttatcacggcggaaaatctcgtttaaagctcgcttcgctcgcaaataagaaaaatttaaattgaaatttgcagagctcaaaatttttttacgttggaaaataggtttgtcttcaatctgaaatattttatttgtaaaatattcgtacttagttttttatttcgaacggctttttgcattattgttacaaagaaagactggtgggcattatgcgtaatttgtgatagttgatttgatgagatttactatcttaggattttaaataaagatacttcccttttatcagttttgaaagaagaattaacctttgacgaataatacattttagcgtaaaatagtaaggaacgataattatagataatcggattattgtggggatttagccttgaccgattatgataaggagaaccactttggaattagaagtatttgctggacaagaaaaaagtgaattgtcaatgattgaagttgctcgtgccattttagaagaacgtggccgagataaagaaatgtattttagtgatctcgttaatgcgattcaagtttatttagaaaagtcagatgcagacattcgtgaagcgttaccgtttttctattcagacttaaacacagatggtagctttatcccgcttggtgaaaacaaatggggtctgcgatcttggtatggtattgatgaaattgatgaagagattgtgacacttgaagaagatgaagacggtgcaccaaaacataagaggaaacgtgttaatgcctttatggatggtgatgaggatgctattgattacagtgatgacgatcctgaagatgaaagttttaataccgctgaagaggatacagaatatgatgaggaagatccagatgatgaaaagtccgaggttgaatcctatgattctgaaatcaatgaaatcattccagatgaagatttagacgaaaatgttgatttagatgaagaagatgacgattattctgatgatgaggaagatgaagaaggagaataaatttcttcattgacaaaattcataagatagtttatattatttattgggcacctcttttgaggtcagaataagctctctacttgtagggggtattttttcattttcctcacaatataaaacaaaggagcatttaatgacaaaatatatttttgtaacaggtggtgtcgtttcgtcaattggtaagggaattgttgctgcaagtcttggacgtcttttgaaaaatcgtgggcttaaagtaaccattcaaaaatttgatccgtatattaatattgatcctggaacaatgagtccttatcagcatggtgaagtttatgtgactgatgatggtgctgaaactgaccttgaccttggacattacgaacgtttcattgatattaatctgaataaatattcaaatgttacaacaggaaagatatatagcgaggttctgcgtaaagaacgtaaaggtgaatatcttggagcaactgttcaagttattccccatattacagatgctctaaaagaaaaaattaaacgtgcagctacaacaacagactcagatgttattatcactgaagttggtggtacggttggtgatattgaaagcttgcccttccttgaagcccttcgtcaaatgaaagctgatgtgggtgctgataatgtcatgtatattcatacgactttgcttccttatcttaaagctgcaggagaaatgaaaacaaaaccaacccaacactctgttaaagagctgcgtggtttgggaattcaacctaatatgcttgttattcggacagaacagccagccggacaaggtattaaaaataaattagctcaattctgtgatgttgctccagaagctgttattgaatcacttgatgtggatcatctttatcaaattccgttaaatcttcaagcacaaaatatggatcagattgtttgtgatcacttaaaactggatgtgcctgttgccgatatgaccgaatggtcagcaatggttgataaggttatgaatctcaagaaaaagactaagattgctctagttgggaaatatgtagaattgccagatgcttatttatcagtcgttgaagctcttaagcattcgggctatgttaatgatacagccattgatctcaattggattaatgctaatgaggtcactcctgaaacggttactgatttgctgggagatgctgatggtattattgttccgggtggatttggccatcgtggaacagaagggaaaatagaagctattcgttatgcgcgtgaaaacgatgtgcctatgctaggaatctgtcttggcatgcaattgacttgtgttgaatatgctcgtcatgtccttaaccttgaaggagctaattctgcggaattggatccagataccaaatatccagttattgatattatgcgcgatcagattgatattgaggatatgggaggaacgcttcgccttggcctttatccatgtaaattgaaatcaggcagcaaaacagcatcagcttatagcaatcaagaggtcgtacagcgccgtcaccgtcatcgttatgaatttaataatgcctttcgtcagcaatttgaagaggctggtttcgtattttcaggagtatcaccagataatcgcttggtagaagtggtggaattgtcagataaaaaattttttgttgcagctcaatatcatccagaattacagtctcgtccgaatcgtccggaagaactttatacagcttttattactgcagcggttgaaaacagtcaggcacattaattgatagaaaaatgagttacttgacacggctttcagtaaaaagaataaagagattccatgtagattaaacttttgcttataaagaaacaccttcttaaatctcatttactagatttaagaaggtgtttctttttttggatcattattacagctaatcgttcaattcaaaaatgaataaatcatattagctattacaaaaatacattccagaataaaaattccaaaacagagaagcttgacagtaccgcttcggctatacttagaaattaagactaatactgcgaaacttaatagtatgaacgagtaaataataaacatcatatattcagcacaatctctttataatggcgtattgtaaccaacccccaacaactactacgccaaccttcaccttggatttgtacaaagcaatcagcatccaaagatttaaatacttcaaaagctaaactattcatactgaatctcctttaaataaatatggtttctatacccgttatagttaaagaaattggctgccaacaaaacgaatacacgtatagtttagtttttttcaagaaaaattcaagaggattttatcattgtaatgaaatatttattatttagacattattgtgttattttcctgtttttttaagttttttgccatgcaaaattattttttagcagctattattgtattaaatagcttaaagtaataacgaatttgattgtattaagtcactttgagtaatgaggagattactataatttcaagggaaaaatgttgacgttttatagatatatttttcagtatcaaaagttttgattttactttggtggtttcaattgacctttttaagatttgacactcaaatgaaaaaagtgaaaaaactcttgacactatctttgttagttgatataatttaaaaagttgctacgcggggatggcggaattggcagacgcgcaagactaaggatcttgtgaccgcttttggtcgtgagggttcaagtccctctctccgcaaagtgagctgactgttcaagtcagctttttttgttgtctaggtcagttagagaaaaggttgaaacttttgataagggctggcaattttactgtaaaagtgataaaataaacaacgtaatgggtttgacccaaaaaatatttaggaggcctttaaaaatggcaatcgtttcagcagaaaaatttgtccaagcagctcgtgataatggttatgctgtcggtggatttaacactaacaaccttgaatggactcaagctatcttgcgtgcagcagaagctaaaaaagctcctgttctcattcaaacttctatgggtgctgccaaatatatgggtggttataaactttgtaaagttcttatcgaaactcttgtagaatcaatgggaatcactgtaccagttgctatccaccttgaccatggtcattatgaagatgctcttgaatgtatcgaagttggctatacttcaattatgtttgatggttctcatcttccagttgaagaaaaccttgaaaaagctaaagaagttgttgcaaaagcacatgctaaaggtatttcagtagaagctgaagttggtactatcggtggtgaagaagatggtatcatcggccgcggtgaattggcaccaattgatgacgctaaagcaatggtcgaaaccggtattgatttcttggcagctggtattggtaatattcacggtccgtacccagcaaattgggaaggtcttgaccttgatcacttgaaaaaattgacagaggctgttccaggtttcccaattgtacttcacggtggttcaggtattcctgatgaccaaatccgcgcagcaattaaacttggtgttgccaaagttaacgttaatactgaatgtcaaatcgcatttgctaatgctacacgtaaatttgctgctgaatacgaagcaaatgaagcagaatacgacaagaaaaaactctttgacccacgtaaattcttgaaaccaggttttgaagctattacagaagcggttgaagaacgtattgatgtctttggttcagaaggtaaagcttaattacttggttaacaaattgaaagattctctttccctagactgaggaaatcctattttggataatttcttcagtctttttgttttctcttttgagggaggcacaagattaaaattagaattaatgatgcaccatggataaacgaaaaagtatagtaaaaattaaggcttgaaatctagaaactacaaaaaatcattatagaaaatcagaaagggtctcttgacaatatggaacgttccatgtataatataatcactaaaacgcttacacttaaagtagttttttgagggaaattgaacgttcaatattttaaggaggaatttattatgacagttgttgaggctagagtagatcaaagattaatccatggaattgtagtgaatcagtggaattcgaaactgaatcctaaacggtttatgattattgatgatattgtaagcaatcagccagagataaaaaattctatgaggatggcgaagccctctgggaaaagcatgagtattattgatacacaaaaggctattgcaaatttcaaaaatggtaattatgataagcaagatgtgtttatcattgtcaaagaaccttctactttgcttaaattacttgacaatggtatttctattcccagagtaaacttaggaattgtgtttgctgatgatgttaggacaaatgtcagtaagttcgtaaatctgaatcaatctgaagtaaatgaattgaagaaaattgaggaacgtggaattccaatcatcattcaatatattccggatgattctgtaattgtctttgaaaaggcaatagaaaataaaaaatttaaatgagagggaacaaaaatgtcaatagagtttattcaaaatattttagttattttattgtcagcctacgtggtaatggataatcttggtattacaatttttaattattgggctgtaacaacaggcatgcttgttggtttaataatgggggatatcaatacaggacttttaattggagggacttttcaattaatgtctttaggtgttgctgggctaggcggagcttccgttccggattatggacttgctgctcttgttggtacgtttttggcaattaggacaggatcgggtttgtctactgcggtagcagttggcttaccagtaggtttattagcgattaattttgatgttttagtaaaaattttaaataattttgtggcacataaaatgcaaagattagctcatgaaggcaaatataaacaaatgttattatggggttggatcggaccaataatgtttatgttaaaaagtgttattattgtcactattattgtgacagtaggtccaggagttatcaaatccattttaaatattattccacaatgggttacagatggtttaaatattgctggtggaatgttaccggtattggggattgcactgttattacactatatgcctgcaaagaaatacttatgggcagttttaataggatttgtacttagtacctacttaaaagttccaatcattggggtctcaattgttggtgctgcagctgcaattttgatttatcaaagtaaagctgaagaaattgttacttcaaaagaaaaaatgagctctttaagcattactgatgaaggagattatgatgaataaaaaagaaattaataatattattacaaaacgtgatcgtcacaatgctattctcagatggatgttcatgggttcagcattatataactatgaaacagggcaagcaagctcagttgtttggtccttagctaaattgctaagaaaaatatatccaaatgatgaggaatacaaagaagcattggataatcattttaattattttaatacaacgactgcaatggcaaatattatacttggggcaacaactgccatggaagaaaaggatggaattcaaactaaggacgcagttaaatcattaaaaacttctcttatgggaccttttgcaggaattggggacaccattatctgggttttattaccaaccatcatgggttctatttcgggctatatggcagttaaaggcaatcctttaggtacgattgcatggattattattggagcccttttattttggatacgtattaaattatttgatattggttatacatcaggtgtgaagttagtcactaatttcagtgataagttgtctctttttacagaagccatgtcagcttttggtctgatggttgttggaacattggtatctacagtcgtaaaagtatatacgcctttaactttcaaggctgggaaggtaaccttgttagtgcaagagaaaattttagatgctattatgccttccctacttgcagtggtgttgacatatgttgtttacaaaatgcttgagtctaaatggtggacgcctactaaaataattatggcaattattattgtttcattgctaggagcatatacaggaattttaggtgtaaaatgatggaaagaagaatcatcatagcttctcataatcatatggcatcaggtctaaaaagtaccatagaatttctagctggtatccagaataatatagtaacattagatgcctatactgatgggaaaccgattggagataaaatcgagaaaatttttaatgattttccccaagaatgtgaagtcgttatttttactgatttactctcgggatctgttaatcaaaaattttttccatatagagttagggaacatgtacatctgataacaggaatgaacttacctattattttagccatggttttgaatcatcaggaagtatatctggaagaagaacaggtaagttatatggttcaggaggcgcgttcatcattagtgtatgtaaatgaaatgaatttaaatgatgagggggatgagtgatggaaaaaataattagagaaggttcagtacgcttttcaattattacaaattcacttctaagaattgaggaagatattgaaaaagtatttgaagatcgtccttcaacaacagtactaaatcgttcctttggagaagttaatgcggagataatccgaaatcataataatcatatcttggaaatagtgactccctcgtttcacttgtattatgatggtggctctctatctccaatatcattatacgtagatattaaaaagtccagttctctttatcataatagatggttttttggtaagaaaaatgggacaaaaaatcttaaggggactgtcagaactttggatcgtgccgatggtgaagttcctctggaagacggtcttatgtctaaagatggttttagttctttagatgattcaacaaattttttatatataaaagactcagattcatttgtggcaagaagaaagggaacggtagatttatacctattttgctatgggagggattatcaagatgagttaactgatttttatcgcttaactggttttccgccgatgttaccaagatttgctcttggcaattggtggagcagatttttcccctacacacaagacggatatatagaattgatgcgccaatttaataagaggctaataccaatcagtgtttcagttctagatatggactggcatagaagaaaaattcctcaaaaatacggttcgggatggacggggtattcatggaatagagatttatttccaaaccctaaagaatttatagactggcttcatactgatgggaaaaaagtagctctaaatgtacatccagcggcagggattcgtgcatttgaagatcagtataaagaggttgctaaaagacttcgcttaaatgtagatactgaagagcctgcaaccttcgatttggaggatgaaacatttagaaaagtttactttgaaaatattcatcatcccttagaaagagaaggagtagatttttggtggattgattggcaacaaggagcagcaaaaacactagataagatggatccattatggttattaaattactatcattatgaagataataaaaagtcgcataatggtggattaacgttaagtagatatgctggaccgggctctcatcggtatcccgtggggttctcgggtgatacagtgatttcttgggactctctatcatttcaaccgtattttacaagtacggcggcaaacattggttacacttggtggagtcacgatattggaggccatatgaaaggtcgttttgatggagaattggctacaagatggatccaatttggcgtgtttagcccgattaatcgtctgcattcttcagataatagattttctggaaaagaaccttggaattatggaagagattttgaagaggcgcaagaatattttttaagattgagggctaagttgataccttatattgatacagctaattataaaacacatgcttttggtataccaataaacagacccttatattatgaatggcccgaacaagaaaaggcttatcagtttaagaatgaatatctatttggttctgaaatgattgtttctccaattacaagaccgcatgataaagtaacacaaagctcctttagcgaaacatggcttccaaaaggcgagtgggttgattacttcacacatcttgtatataaaggaaatactgttattaagacctatcgtaatttagatagctttcctgtgtttgttagaaaaggcagtatcattgtcaccaatcaaaattatatgtcttatgctgatgtactacctgataagatcaatattgagatatttacaggcaaagatgctgcttttgatctctatgaaaatagtcaaggaactgtggcaaaaacgtcatttaattggaatgaggcatctcaaaaattagatattattgtagatgatcctcataaaataattcctaagacgagaacctttagtaagactatacacaaatttcatattgatgatgtttttgatgaaattgacaaacgtttaaaacaggcatatactgaatttaatttaaaacaacagatatatgatgcttttatcgattgtgattatgaatacggaagtttcataaatctactaaatacagtggaggatatagatttacgcaatagtataagtgagatagcttatattagagaatcttataataaataaatgaaaagaaatcctacaatcaatgatgtagctcaactggctaatgtcagtcgaggaactgtatcaaactatatcaatggtattactattcgagaagagaacaaggctaaaattgaaaaagcaattgcagagttgaaatatgttcccaatgctagagctcgggagttaaaaacatcaaaaacatcgactgttgtgctaattgtaccaacgacgtggagtcctttttttgcagagttggtttatagaatgcaagttgaattggatcgaattggttttaaaatgatattggccaattctcatgcagatcctgatgaagaagaagaaattcttcgcatggcatccttgaatcaggttacaggtgtgattacgatgtcctattccaatatttataatttcataaatattgggaagaaattaaatttggtttccattgaacgttttatttcagaagatgtccctcttattaccagtgataattatggtggaggtcaattagctgctgagaaattgatcacatttggttcaaaacggttcttacttttgagaagaaaaacaaatcattataatgcgactgataaacggacagaaggttttttacatattatgaaagaaaataatcttcctgttgacatttttgaggcttctttaaaagagaattatattgaagaatttatccattatttgaaaactcatttttctggagatgtcttaacttttgatggcatatttggtgtaactgatgaatatgctgtcattgctaaacaagtgctttttgagctaaatccctcttatttaaacaaagtgaacattatagggtttgatggctcaaagtcgcaagaaaaaggcagttatcaaattgcttccattaggcagccagtggaagcaatggtgaaggcagctgtcaaagttttaaaaaagttaattgatggcgaggaggttccaagtcattatagtaaggtatttgatgttagttttgttgagcctgaaaggttagtgtaaatctggtaatagataaaccgggaataaaatagtcaagtgaacgaaatagtttacagaggatttatgcttattttatataggtaatacccgtggtgctagtaaaaaaatcctaggttataggcaaagatagtctgctctaaccaaagctccaacccctttaaacttctcgctaatggcctttcgatgtcaaactcagaacataaaactgaaaatcgcgcttcaatggttctcctttcagccttgagcctccaatacagaggctggcgtcacaccataattgacaataaatcctgacaaggtcaccagcatatgggctttaaagccgtaaaaccatatcttttttgaaggattgtaggccacagttgcttgatctctaaaactacgaaccttggcgttgcgagctggtaaacaaacaggtaggggaaagctatccatgatcaccatatcatcctgatggaatggctcggtcatgccttgatgaataagcttcaataagggaattaaataccgagctcttcaataaaatcgggttctctctaagccagtttttacaagaaatatctggcatagctgatagaattgacgttgagatttgaggccgagttcagcctgaagtactagaagaacaagaatggcattgtcattaactttacaatagttgaatttcgacggtgcgtcagttctttaggtgcataacgccgataatagaacacatggtttttaatcgttccacactgtattgcaagtgatgatgtttagcggtatcatttaagtcgttcatttggatgtctcctgttcgtttgatcactaacagcatagtccaaatggacttttttgtggactaaaagattaactagcaccacgggttaggtataaatcttcttatttattcttctttagatatagtatatagtttagttccaagttattattaagaaagttttgaaatgatatattttaaagtttttcacgatgctgatcgagaccagaatattctgaaatctttgttgtttatttttgttgacaaaatttttagaaatagtaaaatactaatgttagccgatttagctcagctggtagagcaacgcactcgtaacgcgtaggtcacaggttcaagtcctgcaatcggcataaaaatacaagatagaaagcccttgaattgggctttttcgctaattaaaagtatttttgttgggaaatcatagtaaagttctaacagctttaaattcttgctcgattttttcttatagggtatacccataaacaactaccaacatagaaatatctttatgtcttaaaattttagcaatggcctctgaatcgattccccaaaacgcttacctatcttaaagagaaaatataggacgtagagaacaatagaacgacgataatctagaaaattaactaataatattatgaattcaaaatagtgaccgctagtttaattatagattgaagaataatgtttcttcaatcttttttatatgtcaattggtaaccatttttcttaaatatgaaaattatcgatatttaatattcatatttgaataaaaagtgttatagttattttttgtgatattatacgtaataaagatttgaggtgttaatttggaactagaacaaataagagattttgaaaaagctcaatcaaataatgatataaatgatttttttaattattcttactcaaaagtatattcagaattgttaaatgtagaattagaatcacaaattagttttttgaagaataattattttaaaagccacttcgaaaaatgatatgactattttagatttatgttgtggtactggtcgacatgtaaaaaaattaaatgatgaagattacatggtggatggtgttgatataaatcccgaagcagtaaatactgctcaaaaatcaataataaacaataaatgaaagggaatgagcatatgactacggaacaaggtctcatcattattacgtaacattaggaaaagtctatttgaaggaggtgaagaactatggcagcagaacaaggtcttattatcattgcataatacaaattattataatatacctcgttttataatggagaataaatgttcaattttttcaagaaaaataaactcttcactcaacttgctagcattaatctcgtatcaaagattggagataaactattctatacagcaatgctaacgacagcaacctctcttccagatggaagcatagcagttatggtagtatcagcttcagaaactcttcctatcttaattagtttatttttaggtgtagtagctgatagacaaaggcaaaaactaaaacacttgataggcagttctcttttcagagcagtcatgtatatcagtataggatttatttttaaatatcctccaactttacttttagttatatttgcctccttattaaatctgctttctgatattagtgggaattactcaacggcgctattttcaccttttactaaaatactgattaaatcagaagatatggaagaagcacagggttttatcagtgttgggacacaactagttaccgtttttgcaacttttattggtgcatcattgctaaccatttatacagagagttcattagcgatgctaaatgccctcattttcctaattgttaccttgctttactggtcggttaagtcgcctctaaaaaaacaagaagacaaactaaaaatagttgaacacgagaagacattcttagttgttaaagaaaatttacgttcttttctatctgacaatatattgctcattaatctcattcaattagcaatgcttaatggattttttggaggtttaactcctatatttgctctatttataaaaagcaataatgaactagttctgttaagtaatcctgttaagatttctctcttatcaggaattatgacattatctatgatacttggaaatagcctaacatcaaaaattcttagaaaatattctatttttcatatcaatgtatggtctgacgtgatgattcttctaataggtattggttttaatcttaatagtatttggataatcttcttagctaatagtagtcttgccttcttattaggaattgttgccccaagattttctgctgatgtggttaatcgttacccagtcgaaagaattggtggaattattacaactgttaacgctctcttagtaatagcccccccattaacaagcctgatattcccaatgctatctactattagtatgctgcttgcttactctggctttattgtttatgctttattattgatagtaattagtctatttctagcaaaaaagaacgcttgagttgtcaagtgttctttttatcttatagtagattaacaatattatctttgagaaattctgcaacatcttcatgccctagctcttcaacatcatgaatatatttttttaaatctattaaatgagtaccttttccttctcgatagtttaaaactttttttaaaaatataaatgtggtttttacaaacatgtcttgataagtcagaatagattctaggtgtttcataaaatagtgaacacaataatcttttttcctctctaatagcacaaagataatatttagaacaactaattgagtccgaaagttattatttggaatggacaagtataatgaatctctttctataaaagacttgctaagaaatataaggtcactatctgataatacttgtaaagtattgccaaaaatgtacaattcatattctgtccactcttcaatgctataaaggtaagttgtaatgaaatctttatcgtcgtctgagataatgtattctgggtttaaatcatgaatagcacaacgaataacaagtttattgagtttatcatagacatcataagtttcggaattatcatcatgaattattagaagcttttcaagaccttcaatatttttatttgaatggtatttggaaattaacttagcttgtttaaaaaaggcactgtcttcatattgatagtacgcatgctcaaattcagcaaaactcatgtgtatagccgatattgcagtcaataatttatccgctgacaacatcgtttgtccgttttcaaatttagataattgtgcctgcgacaatttatcactaactacatctttcattttcagacctctagctactcgcagttctctataaagctctcctaaatgaaacgagtctaatttagtcaaaatattattcctttacttattgttaacaccatctattttagcaaaaaaataacattttgataattgaaaatgatgtcatataaaatcagtataagccttaatttctggtgtagctaattattgggaaataaaattaagataccattttataagttgggtaaatccttaaaattattgatatagggtgttttaatattatctttgcaaagaaaaataaaaaatatttctgcaattggcatagagataaaaatacttaaaaagagagtagagaacattacgtttgttctctactctctttttgctttgagctagataatcattcaatttaaactagcggcataagcatctaggagaatgcgcgaaaggatagaaagtggtaagcgtgagtgaacttcatagtctggaaagtaagacagttctgttttaaaacctattaattgtagtgaggttaaatgagctagagaactgctttcactagcgctcaataaaatggttttaaccctatttttaatgcaatttctagcagcatcaaccaaagcaaccgtttcgccattaagggaaataaaaagaacaagatcttttgatgttaaccgtgcactgactgggcgaataatattagggtcagtatgtaattcgcagtatttattgagcaactgaaatttgacgagcatttcagaagcgataagttctgaaaatcccctagcaaagataataatgcgctgtgccttttcaatcattaaaatactttcttctatggcggtaacatccagcgtattaagtgtccgcatgacttcttgataatttttaatgatggaacgtctggtatctttttttaaagatttattagttaacacgtgcaggctgttatttttcttttgttctatttcgtgtttaaattctgaaaaaccgccatatccttttttcttaagcgttctaatgatggttgcatttgaaacattaatagcttgactcagttcagaaatatttaatttcccaatctcattgaaatcacgggtgatgtattgccaagtgtattcttctgtttcggttaatttcttgttatttttcatacaatcccgccttagaaaaatttttctttttaatgatttatttagaaatttcattctaaatgaaagtgctatcataaatatacaggatatgataataaattgcaactaaattagaaaggaaaacatttatgggaatttatacttgtaccatgaatttagccattgatttatttattgagacagaacacctgtatgagtctaaggttaatcgtgctttatcagatgatattcaggcaaatgggaagggcgttaatgtgtcttttattatgaaaagacttgggcttgagaacactgctcttggtttttcgggaggttttacaggaaaatatgtcgcagacaatttagaagctgaagggatagctgccccttttgttgaagtagaaggactgacacgaattaatgtctttactaaagtaaatgctacctgtcaggaatttaaattagtcaatcagggacctttggtcaatgaaaatgctcagagtagattattgcaacaaatttctaactttcaaaagggagattatctcattgtatctggcagcttacccagaggtgttccatcgcaaattctatatgatattgctaaattgtgttacgaaaagggtgttaatcttatttttgatgtgagtgattgtatcattatggatagtttgtcatttcatccttttttgttgaaaccaaatgaagaggaattagctacttggtttggcaaaaatcaattggaagaggaacaattgatttcttatgctaagcaattaattgttaagggagcacgtcatgttcttttgtccttaggacaagatggagctatttttattgattctcactttaatgtctatcaggctaatgctcctagaggaaaggtggtgaacacagcctgtgcaggggatactttattggggacctttttggcaggattcatcagacaggaatctttagaaagggtattagcaaaaagtgtagctgctggttcttcaacggcttttagaagtggtatcacagactttagtgatgtcaatgaattaaaagaacaaattatggttaaaaaaataaaggagtaagattatgtcagaatttaaacttattgcagcaactggctgtcctactggtattgcccatacgtttatggcacaagaagctctagaacaggctgccaaggaaaaaggtgtttctattaaggttgaaacccatggacaagtaggagtagagaatgaattgactcctgcagaaatagcaggcgccaaagctgttattattgcagccgacaaggatgttcaagcagaacgttttgctggaaaaagagttattgaagtttctgttgctgatgggattaaaaaagcagaccaattaatagcggatgctttagctggcaaaggacaaattaaaggcggcactaaaatagaaagtgcagagctttcttcagatactgagggagaaagttttggacggcaagtttatagacatttaatgaatggtgtttcccatatgttaccgtttgttgttgctggtggtgttttggtagccatttctttcttatttggtatctattcttttgatcctaaaagcgaacaatataattggtttgcagcactgctgaaaacagatattggtggtgttgcgatgggcgttatgactcctattctagcggcttatattgcagagtctattgcaaaacgtcctggctttgttgctggttttgttggcggcatgatggcggtgaatggtggctcaggcttcttaggtggtattatcgctggttttgctgcaggttacattgtgttaagtctcatgaaactgtttgaaaaattaccaaaatcattggatggcttaaaggcaatctttttgtatcctgtatttggtgtctttttgacaggaatggttatggctgttgttaattcacctatggcttgggttaataagagtttaatggcatggctaggtgcttttgaaaatgctaatccattggttcttggtgttattgttggctgcatgtgtgcatttgacatgggtggtcctgttaataaagcggcttatgttacgggtacggccctacttgcacaaggaaatacaacctttatggctggtgtatcagcagcatgcattgcacctccactcattacttttgttgcgaccactgcttttagaaaatattatgatgaaaatgatcgtaatgctggtttggcaaatcttattttaggttccactcatattaccgaaggggcgattcctttcgcggctaaagatccgcttcgcatgttaccaaccttcatgctgggctcatctattgctgctatcttaacctatatgtggaaagttaaggtcccagcgcctcatggtggctttctagttctaccagttgttacccatgccttcctttgggttcttgctattgcaatcggtgccatagtagctggtattattatgggattcattcaaaaatcaaaatatgaaaaagcaagaggttaagaaagaggcatacaatgattgatgaaaatctgataaaaataaatttgatatgtgagtctcaggatgaggtcttccactatttagcaactttagttgtagatgatggctacgctaacaatacagaatccgttgttcaagctttaaaattgcgggagtctgaaggtactacaggcatgatggaaggctttgccattcctcatgccaaagacaaaagtatagttaaacctagtattgccattttaaaacttaagacgggtgttgaatggcattccatggacggtcaattaattaataatgttatagcactcttcatccctgaaaaggaagcagggacaacacatttaaaagtattatcccaaatagctcgtttactagtgaataagacttttaaagaaaagattaaagaggctgacactattttagaattaaaagagcttttaactgaaaaattagatttaacatcctaatcaatgaagggagaattatgattttatcacagcaaaaatataattatttagcaaaaatcagtgattcaaatggcgttatttcagctctagcctttgatcaacgcggtgccttgaaatgtttgatggcacaatatcagatgaaggagccggcagttgctcaaatggaagaactgaaagtgctggtgtcagaagaattaacaccctatgcttcatctattctccttgatcctgaatatggcttgccagctgcacaagcgcgtgatagggaagcaggactcttgttagcttacgaaaaaacgggttatgatgcgaacacaaccagtcgtttgccagattgtttagtggactggtctattaagcggctgaaagaagcgggtgctgacgctgttaaattcttgctctattatgatgttgatggagatccacaagttaatgtgcaaaaacaagcttacattgagcgtattggctctgaatgtcaagctgaagatattccgtttttccttgaaattctcacttacgacgaaacaatctcaaataattcaagtgttgaatttgctaaagtaaaggtgcataaggtcaatgatgctatgaaagttttttcagctgagcgttttggtatagatgttcttaaggttgaagtgcctgttaatatggtatatgttgaagggtttgctgaaggcgaagtagtgtatagtaaagaagaagcagcacaagcctttcgtgaacaggaggcctcaacagatttaccttacatttacttaagcgctggtgttagtgcagagctttttcaagaaacgcttgtttttgcgcataaggcaggtactaagtttaatggtgtcctttgtggacgtgccacatgggcagggtctgttcaggtttatatggaagaaggaaaggaagcagcacgtcaatggttgcgtacgagtggcttgcaaaatatcaatgaacttaacaaggttttaaaaacaactgcatcaccttggacagaaaaagtgtcagttggttgagtttttaaggaataatgacaaatgttatgaaatgataacttaattagtcgtataaaagaagaattattcatttaagtatgaataattcttttttatgaattcagctattagttcttttttgattgttgttggctatataggataaacttcgttttatcaacccaatcccggcgattccaatgaaaacaagacaagtgactcttgtataaaagaaaatagtttctaaattcttaacattactagagaatgcataggcgcttaaggctgagtattgatgttgcttccaagaaactccgatcagagtcaataacaaaataaattgttgaataatagcacccagtccgtaaaatttggagtgagtaattcttctttctaaaagcggtaacgtctcatctcttgtaaattcttggagaatgacatgattgccgctagcaataaaagcagagcttagcagaatacctaggagataagctgagggccataaaagtaataaaaaacttgctgtactagccagtaaacaaacgatagtaaaataagatggatttatgatctgttgaagtttctttctgcttgtcatagagagcattaagcctagaacgagcattgtataagaaagtccaaccatatacagtttatcaatagctataaagtaaataaggctatagatgactaaaaaatttctggcagcaccgaaccataaagtcaataaagcttgttgagaaaaatgcaagggtttaaaaagcagaccgataatgataaataagcaaagagaaagtccaatatacaaagcatagtttgtattagctgtctgtttaagtaatcttgtaaaaaaagaaaatagcagcatgctaatggctggaaaaaaatgaagataagcatttcgttttctttcaaaaggaacttgctggctaaggttggcttcttgttccaattgacagataaaggcatatgaagtgagtaacataagcaaaaagaaagtaaaaactaaggttatggaagtatggcgaaaatataaaaataatgaaatgatgattcctaaaataagataagccattattattgttcttttatagggccattcatttttttctttcaacatacttttgattgtcttgaaaagtgccttataattggctaaaccaagccctattaaaacagcacccaattcccaaaataaaaaggaaaaatcaccaaataaacaaaggcaagttcccaaaatagctagcaggaggctatatcttaaaactttgtatggatttttcaattcgccaaatccttgtatagcgaagacccctgctttttcaaatgagtataataaaacgaaaggaagtaaaaagtgatactgcccataatgctgatataaaagtcctgcaaagatgatgtttggaacgataacagcaccttctgctaaagcttcccctagcgaagctgcggtattttttatcactgagttcattaaagtcaccaactttcaaagttaccaccattataatgactcttattggaaagtacaagtcaccgtttcagcatactggtaaattcccaaaataagtatcattttgttattttagtcaagtcaaaaaaaaacaaaaatagagagtactaggacaaaaaacgatccatcgtcatgaaatcgtaattttggttttgtcgtccggtttccacaaagtggattaggtattgctatagactgatattcgtagaatcatatcagtctaatggactgttaaaggtttgaatctaaaaaccaaaatgcaaaaatacccatcaatcactgtacaataaaaaggttggaacatttttgttccagcctcaataaaagaaccgtttccgctgtaataaaaagaagtttaattgttagaaatgatattgagaggattttcaaaatcttcagtttaaaacttagaatgaaactaaactagtgcaaaacgcagccaatagttataagcgttggcgtttcatttgctatctctaccacccaaggaaactgttaaaaaagactacgaatacaacttctgaaatgattagaacactttgttgaaattgttgtcccctcaactttctatggttctttccttaatcccaaatagtaagcatgaaaagcgatatgtttttcgacaaaactggcaataaaataataactgtgatcatagccttcatgcagatctagaagcacctcaatcccgtttgactcagcagcctgaacaaaaacttctggctgtagttgttctggataaaagttatctgctaacccttgatcaatcagaattggtcgtgcttttttcacctgtgatacaagtttgctgctgtcataggctgcccaagtcttctcgtccttgccaagataagcagagaaagcttttttcccccaagggacattgctcggattgacaataggtgcaaaagcagagatggcagcataacaatctggattttttaaaccgatttgtaaagcgccatgaccacccatactatgtccaaaaatagaccgttgattcgttacagggaaattcgcttcaatcagctctggcaattcttctacaatatagtcatacatgtggtaatgttgtgaccaaggattctgagttgcgttgagataaaaaccagctccttgtcctaagtcataagttttatcatcaggcacattcttacccctaggtgacgtatctggtatgactaaggccaagccatatttggcagcatactgctgagcaccagctttggttgaaaagttttcatctgtgcaagtcaaaccagataggaaataaagaacagggaccctcctatctgctgcctgaggcggcagataaatggcaaaggtcatctcagtattcgttgtctttgacgaatggctgtagcgctcatgccagccaccaaatattttattttttgatagttgtttcatgcctgcctcctcagtaatgaatgactgtgcgaatagatttgccttcatgcatcaagtcaaaggcatcgttaatctgctctagaggcatggtatgggtaataaaatcactcaatgcaaactcgccagccatatattgtccaacaattcccggcaactgtgttttgcctttaacaccaccgaaagctgaaccacgccagacacgacctgtaaccaattgaaatggacgagtatgaatttcagcaccagctggtgctacaccgatgatagtactctctccccaacccttgtggcagcattccaaggcagcccgcatgacttctacgtttccgatacattcaaaggaataatcaacaccgccgttggttatgtcaataatgacttcctgaattggtttagcatgattattgggattgactaaatcggtagctcccaattttctagccttgtcaaacttatcgggattaatatcaatagcaatgattcgagaggctttagccatacgagcaccaataatagcagctagtccgataccgcctagaccaaaaatggccacagttgctccctcttcgactttagctgtattcaaaacagcccccatgccagttgttacaccgcagcccagcaaacagacttcttcaagcggcgcattatcctgtattttaaccaaagagtactctgaaacaacagtatgttctgcaaatgttgaggttcccatataatgataaataggttgaccatccttaaagaaacgaactgtcccgtcaggcatgacaccgcggccttgtgtttcacgaacggctgagcataggttggtctttcctgaaaggcagaactcacatttaccgcattcggctgtataaagcgggatcacatgatcaccgacctgaaactctgttacgccttcgcccactgcttcaacgataccagcaccttcatgtcccaaaacgcaagggaaaatcccttctgaatcttttcctgatagggtataggcatcggtatgacagactcctgtcgctgtaatatgcaccataacctctcccttttgtggcatcatcaggtccaactcttcaattttcaagggttcattgggtgcccaagcaactgctgctcgtgttttgatagtattcatcactatgtctccttttcgctttatttgttattagacttgtttggcagcttatttccatctatttgatttgttttttgccagccagttttaggcgattggcacacaagcaaccgactccaccgtttcattgcgttcttcttttcaagtaacgatttgaaaaagcccgcccccattgcttaaagaaaatagttagtttcccaacaagtctattaaaaatcaggccatgttatggcataagaaatcattcaaagttccataaactgacctttgtattatcttaacatataagtaccgttcgaggtcaattgtttgctgccttttgtttatagataattgcttttcttcacatgtctactgtgcaatactttagtagctattgtcaaatggtttttattttgctataatgctaaagtatgtggtgaattcaccttaaactaagtaggaggaaaacagttaaatggctaaagtatgttattttacaggacgtaaaactgtatcagcaaataaccgttcacatgcgatgaacaaaacaaaacgtgttgcaaaaccaaatcttcaaaaggtaactgttcttattgacggtaaacctaaaaaagtttgggcttcagctcgtgctcttaagtctggtaaagttgagcgtgtataatgtgaagagcctgcgggctttttttgttggtttgtttatatttctgttatgcttaaccttgattttttctttttaaaagatatctaaaatagattaagcgcatcagaaatcctgctgtccagccaaaaggagcagccatccaaataccattgaagcctaatgaagtgtgcgagagtaaaacagctaaaggcacttgaagaatacagaaagttgttatagaagcaattaaaggaagaagtgactttccgtaacctaacagaatgccattaagaacttgcatagctccgaaaatgggataaaagactgatacgatatgtaggtattgctgaccgatctgcacaacggttgcatcacggttaaaaatagaaatgaggactggagcgaaaatataaatgataacagatatgctaaccgataagcctattgaaaaaagcaaggtatgattgcctccttttgtaatccgttttccttttccagcaccttcattttgagcggtgaaattcattaaggcttgtccaagattaacagcgggcatttctgcaaaagagtcaaccttagaagcagctgtgtaagcagcaatagcacttgttccaaagctgttgacaagaaattgaatgacaagaaagccaaaactaatgaaaacctgttgcatcatggcgggaagaccaatggctaaagatttttgtaatgttttaagctgccattttaaatggaacaagtcaggcgataattggggatatttctttttcatataaattaaacagataagaaaagaaaaaagttgagcgaacactgtggccatagcagctccagcactgccttggtgaaaaacggcgatgaaaataatgtccaaagaggcattcagacagatcgaactgattaaaataaaagttggtgttttagaatctcctattcctcttaaacaatttgctaaagtattgtaagcaaaaagtgggactaagcccaacaaaataatttttaaatagccgtcggcctcaggtaataaaggttgtggaacatttaactgctttaaaaaagggtttgcataatagataccgaaaagggttaacacaaaggccagtatacttgtgaacatcaagttggtatccagaacgcttttcattttttggaaatgctttgctccataaagttgagatattaacacgctggctccaatggaaactcctgttgagagagcaactgtcagcgtaacgacttgggtactggctccgacagcagccagtccttttgtacccacaagatttccaacaattgcagtatccgtcacattatacaattgttcacataaatttcctaaaagaataggaatggaaaaatataagattgtttttaattcacttcccttggttaagtccgtcatttatctgctccttttaatcgctatagtaaagtaaaaaccatacaatccgtacaatattgcacaatactattataaacgaaaaggatcgctatcgtatgagtaaaattgtcagcaagacaattttatcaaagccagtcagcagcagattctgctttaaattttcctgctgacttttagtcgtcaatcctgttgaattatgttaaaatggtcttagtaatgcgaggaaatgatatgtcggaattgtttaaaaaattgatggatcagattgagatgccgcttgaaatgaagaattcaagggttttttcatctgctgatattgtggaagtgaaggtttatcctgagagtcggatttgggatttccgtttttcttttgagaccatcttaccaattgatttttatcaggagttaagaagcagattagtgacaagttttgaaacagctgatattaaggctgtttttgacattgaagtggagaatgctgaattttctaacgagcttttgcaggcttattatcaggaggcttttaagcagccgacttgcaatagtgctagttttaaaagctctttttcgcacttaactgtttcctatactgatgggaaagttcttatttcagcgccgcaatttgtcaataatgatcattttcgaaagaatcatttacctaatcttgaaaagcagtttgaagcgtttgggtttgggaaattaagttttgacattgtatctaatcaaaaaatgacagaggaaataaaacatcattttgaatcctctcgtcagcagcaaattcaaaaggctagtcaagaaacgctagaaattcaaaaatcattagaagcttcaatgccgcctgaagaaacgcctaaatccgtatccaatttcaaagagcgaatcaaggatcggcaagcagcttttgaaaaggctgagattacgcctatggctgaaattgaaactgaggaaaatcgtatcacatttgaagggcttgtttttgatgtggaacgcaagacaacaagaaccggacgtcatatcatcaattttaaaatgacggattatacctccagttttccgatgcaaaagtgggctaaggatgatgaagaattaaagaaatatgacatgatttctaagggtgcttggttgcgcgtgcgtggcaatatcgagaataatccttttacaaaagccctaaccatgaatgtccaaaatgtcaagaccattgttcataaagagcgtaaggacttaatgccccaaggggaaaaacgtgttgaatttcacgctcataccaatatgtcaaccatggatgctttgccaacagttgagcaattagtggccaaggcggctcagtttggtcatcctgcggttgctattacggatcatggcaatgttcagagtttccctcatggctatcatgcaggtaaaaagaatggtattaaggttctctttggcttggaggctaatcttgttgaggaccgtgtacctattgtctacaatgaagttgacatggatatgaatgaagcgacctatgttgtttttgacgtggaaactacaggactttcagccatcaataatgatttgattcagattgcagcttctaagatgcataaaggaaatattgttgagcaatttgatgagtttattgatcccgggcatccgcttagtcagtttacaaccgatttaacagggatcacagatcagcatgtgaaaggggctaagcccattttacaagtattgcaggaatttcagtccttttgtcaagatacagttttagttgcccataacgccacttttgacgttggctttatgaatgccaattatgaaaggcatgacctgccaaagattacgcagccagtcattgataccttggaatttgcacgaaatctttatccagaatacaaacgtcatggtttaggtcccttgactaaacgctttcaggtatcgcttgagcaccaccacatggctaattacgacgctgaggcaactggtcgtctgctctttatctttcttaaagaggcgaaagaaaagcatggggtcaacaatcttttagatcttaatactaaaattgttgatgataattcttacaagaaagctcgggtaaagcatgcaaccatttatgtcctgaatcaaaaagggttgaaaaatttatttaaattagtcagtctatccaatgttacttattttgcaggtgtggctagaataccaagaacgattcttgatcagtatcgtgatggcctcttactggggacagcctgctctgatggtgaagtttttgatacggttctctcaaaaggagttgaagatgctgtggaggtagccaagtattatgattttattgaagtcatgccacctgctctttatgaacctcttcttgctcgtgaattaatcaaagatgaagcaggaattcagcaaattattaaagatcttattgaagttggtcgtcgtttagataaacctgtcttggcaactggtgatgttcattatctggaaccggaagacgaaatttatcgtaaaatcatcgttagaagtctgggacagggagctatgattaatcgtcctattgggcgtggtgaaaatgctcagccagctcctctgcccaaggctcattttagaacaaccaatgagatgttggatgaatttgcttttttaggtgaagatttagcccgtgacattgtcattaaaaatccaaatgagatggttgagcgttttgaagatgttgaagttgttaaaacagacctctatacgccttttattgagaattctgaagaaaaagtcgctgagatgacttatgaaaaggcctttgaaatttatggcaatcctcttccggatatcattgacttgcgtattgaaaaagagttgacttccattttggggaatggatttgcggtgatttatctggcttcacagatgctggtaaatcgttctaatgaacgtggttatctggttggttctagaggttcggttggttctagttttgtggcaaccatgattggtattacagaagtgaatcctatgccgccacactatatttgtcccaatccagactgtaaacattctgaatttatcacagatggttctgtgggttcaggctatgatttgcctgataaagtctgttcggaatgcggcactccgtacaagaaagatggtcaggatattccttttgagaccttccttggttttgacggagacaaagttcctgatattgacttgaacttttcaggtgatgatcagccgagtgctcacttagatgttcgtgatatttttggtgaagaatacgcctttcgtgcaggaacagttggtacggttgcagatagaacggcttatggctttgtcaaaggctacgaaagagattatggcaagttttaccgcgatgcagaagttgataggctggcgcagggttcagccggtgtcaaacgaacaactggacagcaccccggtgggatcgttgttattccaaactatatggatgtttatgattttacacctgttcagtatcctgcggatgatttaacagccgaatggcaaacaacccactttaacttccatgatattgatgaaaatgttcttaaacttgatgtgcttggtcatgatgatcccaccatgattcgcaagctgcaggatttgtctggtattgatccaaaaacaattcctgctgacgatccagaagttatgaaactgttttcaggaacagaagtcttgggagttactgaggaagagattggaacaccgactggaatgttaggaattcctgaatttggaaccaactttgttcgtggaatggtggatgagacccatccaacgacatttgcggagcttttacaattatcaggactttcacatggtacagatgtgtggttgggcaatgcacaggatctcatcaaacaaggcattgcaacgctgtcaacggttattggttgtcgtgatgatattatggtttatcttatgcacgctggtttagaacctaagatggcctttactattatggagcgtgtacgtaaaggggcttggctgaagatttcggaggaagagcgaaacgggtatatctcagccatgcgtgagaataatgtgccggattggtatattgaatcctgcggaaaaattaaatacatgtttcctaaagcccatgcggcggcttatgtcttgatggctcttcgtgttgcttattttaaggtgcatcacccaatttattattactgtgcttatttctctattcgtgccaaggcttttgaattaaagacaatgagtgctggtttggatgctgttaaggcacgcatggctgatattagtcaaaagagaaaaaacaaccaagcttcaaatgttgagattgatctttttacaaccttagaaattgtcaatgaaatgctggagagaggtttcaaatttggacagctggacttataccgcagtgaagccgttgaatttatcattgatggcgatacattgatacctccttttgtggctttggaaggtttgggcgaaaatgttgccaaacaaatcgtaaaagcacgtaatgaaggagagtttctttctaagacagaactgcgtaaacgcggcggtttgtcatcaactttggttgaaaagatgagcgatatgggaattttaggcagtatgcctgaagataatcaattgtcactttttgatgatttcttttaatgtgataggaggttaggataaaattttttatcctaacttttattttattaaaacagtagatttgttcggcaactaatgcttcttttttattgctttccttaagtagtgagggcggagagtaatagttcagtggactgttttacagcttaattaaaacatttttcttgaaaataacactaattagtagtaaaataaaaagaggtaatggtcatagagaggagttgtatgggtgatttagataagaatcctgcagttaaagctatggttgtttttcgcaaggctatgcgaacaattgatgcgcaagttgctccaagctataaaaacaatggtttaacacaaacccagtttgccgttttggatgttctttatgctaaaggagagatgaccatcagtcgtttgattgcttctatactggcgacgtctggcaatatgacagttgtgattaaaaatatggaacgtaatggttggatttaccggagcccaaatccagatgacagacgtgcctcggttgttggtctgacggaagttggcaaacaattgattcaaaaagctttgcctgatcatattgctatggtagaatctgctttttctgtaatgacagaagaggagcagttagtcctaatagatctgttgaaaaagtttaaatctctttaaaaaggaacaggttttagttagcaatagtttaattatatattactatttagtgataaaattatttaataaggagacattatgtcaaaaagaattttatttattgtcggttcgtttagtgaaggatcattcaaccgtcaattagctaaaaaagcagaaacgattattggtgatcgggctcaagtttcttatttaagttatgatcgtgtcccgttttttaatcaggatttagaaacgtcagtacatcccgaggtggcacatgcacgagaagaagttcaagaagcagatgctatttggattttttcacccgtttacaactatgctattccgggccctgtcaaaaacctgcttgattggctgtcgcgctctcttgacttatcagatccaacaggaccttcagtgcttcaagataagattgtgacggtttcctccgttgctaatggggcgtctccagaggaagtttttgaggattaccgttctttacttccttttattcgtatgcatttggtagatcaattaacaggtgttccaattaactcagaagcttggagcacaggtattcttaaagtatcagcagaaaaattagcagaattatctgctcaggcagatgctctattgtctgctgtagaaaattaggcaaaaggtattctttaaagatttgaatgggatagagctatttcgtttatcttttgtgaggccgcaagttcatcttgtttaactcaagtcacgtctgcggtttgctgtctggtactaaaagaacacttgaagttcattcttaacaatgagcttcaagtgttctttttgtgtcttaacttttttatgtgaatgaaaatgtaagagaattctttttgatagttgctttttttagttttcaaatgactgttatagtgggattcttatctgttacaaaagtttgtgaataaaataatttgcgactgctaaaacccttttttatagctgtagaaagcggttcaaattcttgcactttgtgaaaaaataagctactataaaatggcaagaaaaattttggaggtcattatagcaatgttatctaaaaaacaatatttggatatgtttttaaaaatgcagcgtatccgtgatgtcgatacaaaactcaataaattagttcgtcgtggtttcgtacaaggtatgacacacttttcagtaggagaagaggcggcttcggttggtgcgattcaaggcttgactgatcaggatattatcttttcaaatcaccgtggacatggtcaaaccattgcaaaagggattgacattcctgctatgtttgcagaattagccggtaaggcaacgggttcttcaaaaggtcgtggtggttctatgcacttggcaaatcttgaaaaaggaaactatgggaccaatggtattgttggcgggggttatgccttagcagtcggtgctgctttgacacagcaatatgacaatacgggaaatattgttgtagccttttcaggagactcggcaactaatgaaggctctttccatgagtctgttaatttggcagctgtctggaatttaccggttatcttctttattattaataatcgttatggtatctcaacagatattaattattcgactaagatttcacatctttatttacgtgctgatgcttatggtattcctggacattatgttgaagatggtaatgatgtcattgcagtttatgaaaaaatgcaggaagtcattgattatgtgcgttcaggaaatgggccagctcttgttgaagtggaatcttatcgttggttcggacattctactgctgatgcaggagcttaccgtacaaaagaagaagtagatgcttggaaagctaaagatcctctcaagaaataccgcacttttctaacggaaaataagattgcaacagatgaggaacttgatatgattgaaaaagaagtcgcacaggaaattgaggatgcagtgaaatttgcccaagatagccctgaaccagagctttctgtagcttttgaagatgtttgggtagattagctagatcaagaaaagtcttgttattttgtgtaaaacttcatatattatgccttgtcagagcgattgacatgctgataaattgacaagcgagaaatgcagtcgttttctgatgcttttagggtttcattaaaatgaggagaaagagatatatgtcagaaacaaaagtagtagccttacgggaagctatcaatcttgctatgagcgaggaaatgcgtaaggacgaaaaaattattttgatgggtgaagatgtcggtatttatggtggtgactttggaacttctgttggtatgctggctgaatttggtgaaaagcgtgttaaagatacccctatttcagaagcagccattgcaggatctgcagtaggtgccgctcaaactggacttcgtcctattgttgatttgacctttatggactttgtgactattgccatggatgctattgttaatcaaggtgctaaagccaattatatgtttggcggtggacttaaaacgcctgtaacctttcgtgtagcctcaggctcaggtatcggctcagcagcgcagcattctcagtcactagaagcttggttaactcatattccgggaatcaaggtggttgcgcctggcacagtcaatgatgctaaagccttgctcaaatctgctattcgtgataataatatcgttattttcatggaaccaaaagcgctttatggcaaaaaagaagaggtcaatttagatcctgatttttatattccgcttggtaaaggcgaaattaagcacgagggaacagatgttaccattgtgtcttatggtcgtatgctggaacgcgttctcaaagccgctgaggaagtggcggctgaagatatcagtgttgaagttgttgacccgcgtacccttattccgcttgataaagacttaattattaattctgtgaaaaagacgggtaaggttatcctagtcaatgatgcttataaaacaggtggtttcattggtgaaatagcatcagtgatcactgaaagcgaagcctttgattatttagatgccccggtgcttcgtctcgcttctgaggatgtgcctgttccctattctcatgttcttgaaacagccattttaccagatgtagcaaaaattaaagaagctatctataaacaagtcaggaaaagataggcaattaaaggtgaatagatgagaatgagaaagattagatgtttacgctaggcaagctgaacttttgttctttctcagctttaaaaggaaggaaatgaaatggcagtcgaaattattatgcctaaacttggtgttgatatgcaggaaggcgaaatcatcgagtggaaaaaacaagaaggtgatgaggtcaaagaaggggagatcctccttgagattatgtctgacaagaccaatatggaaatcgaagctgaggattcaggtgtcctgcttaagattgttaaaggaaatggtcaagttgttcctgtaactgaggtcattggttatattggtcaagcaggtgaagttcttgaaatagctgatgttcctgcaagtacagttcctaaagaaaatagtgcagcacctgctgaaaaaacaaaagtaatgtcttctccgacagttgcagcagcccctcaaggaaaggttcgagcaacaccagcagctcgtaaggcggctcgtgatctaggagttaacctgaatcaggtttcagggacaggcgctaaaggccgtgttcacaaggaagatgttgaaagctttaaagcagctcagcctaaagcaacaccattagctaggaaaattgctatagataaaggtattgatctagccagtgtctcaggaacaggttttggcggcaaaattatcaaggaagatattttaaatctgtttgaggcagctcagcctgttaaagatgtgtcagatcctgctaaagaagcagctgccttaccagagggtgttgaagtcattaagatgtctgccatgcgtaaggcagtggctaaaagcatggtcaattcttacctgacagctccaacttttactctcaattatgacattgacatgactgagatgattgcgttgcgtaaaaagttaattgatcctatcatggaaaaaacaggttttaaagttagcttcacagatttgattggtctggcggtcgtaaaaaccttaatgaaaccagaacatcgttacctcaatgcttcgctcattaatgacgcgactgagattgaacttcatcaatttgttaaccttggtatcgccgttggacttgatgaaggactgttagtacctgttgttcatggtgcagataagatgagcttgtcagattttgttatagcttcaaaggatgtcattaagaaagctcagaccggtaaattaaaagccactgaaatgtctggttcaaccttttccattacaaacttggggatgtttggcactaagactttcaaccccattatcaatcagccaaattcggctattttgggtgtaggagcaactatccaaacgccaactgttgtggatggtgaaattaagattcgtccaatcatggcactgtgcttgaccatcgatcaccgcttggttgatggcatgaacggcgctaagttcatggttgatcttaaaaaactgatggaaaatccatttacattattgatttgaggtttatgtcaactgttgacagatacgtttggttgtcttataaataaagttagaaactaaaaaggagaagaaaatggcagtcgaaattattatgcccaaactcggtgttgatatgcaggaaggcgaaatcattgagtggaaaaaacaagaaggtgatgaggtcaaagaaggggatatcctccttgaaatcatgtctgacaagaccaatatggaaattgaagctgaggattcaggtgtcctgctcaaaattgttaaaggaaatggtcaagttgtccctgtgactgaggtcattggttatattggtgctactggtgaaacgattgaaacaaatgcagcgccagcagcttcagctgatgatctcaaagcagcgggtcttgaagttcctgatactttaggcgagtcagcagcaccagcagctcaaaaaactccgcttgctgatgatgaatatgatatgattgtcgttggtggtggtcctgctggttattatgctgctattcgcggtgcacaattgggcggcaaggttgctatcgtcgaaaaatcagaatttggagggacctgtttaaataaaggctgtattccaactaaaacttatcttaagaatgctgaaatccttgatggcatcaaaattgcagcgggccgtggtattaattttgcttcaaccaactataccattgacatggacaaaacggttgcctttaaagataccgttgttaaaacattgacaagtggggttcagggtcttcttaaagccaataaagtgactattttcaatggtctcggtcaggttaatcctgataagacagtgactgtcggttcggaaacgattaaaggacataatattatccttgcaacaggttcaaaagtgtctcgtattaatattccgggaattgattcacctcttgttttaacatcggatgatattcttgatcttcgtgaaattccaaagtcacttgctgttatgggcggtggtgttgtcggcattgaactcggtcttgtttacgcttcctatggtacagaagtgactgttattgaaatggctgatcgcattattcctgctatggacaaggaagtatcgcttgaactacaaaaaattctatctaagaaaggaatgaacattaagacttctgttggtgtggctgaaattgttgaagctaacaatcaattaacgctgaaactcaatgacggctctgaagttgtggctgaaaaggccctgctttctattggtcgtgtcccacaattaagcggtttagaagatcttaatctggaacttgaacgcggtcgcatcaaagtggacgattatcaggaaacctctatttcaggtatttatgccccgggtgatgttaatggaagaaagatgttagcgcatgctgcctatcgtatgggtgaagtagctgccgaaaatgctatctggggaaatgttcgtaaggctaacctgaaatatacacccgcagctgtttacacccatccagaggttgctatgtgcggtattactgaagaacaagcccgtcaagagtatggaaacgtcttagttgggaaatcctctttttcaggaaatggacgtgcgatcgcttctaatgaagcacaaggatttgtcaaagttgtcgcagatgctaaataccatgaaattcttggagtccatattattggaccagcagctgctgagatgattaatgaagcctcaacgattatggaaaatgagttgacggttgatgagctgctacgttctattcatggccatcctaccttctcggaggttatgtatgaagcctttgcagacgtccttggcgaagctatccataacccgccaaagcgtcgctaatgatagaatcattatagaaactcatctgacagaggataaattggaactatttttgtatatttaattcccttcttttatcctttttaaaagaaatttggagagaaaatgaaatatattatcagtcattcaaatgatccagcttttaatatagctcaagaagcctatgcttttagggaaatgcttgatgaagatgaaatttttattttatggatcaatgaaccaaccattgttattggcaaacaccaaaatgccattgaagaaatcaataaagagtatacagatgctcatgacattcatgtcgttcgtcgcctgtcaggcggcggtgcagtctaccatgatcttaataatctcaactataccattatttccaataaagcagatgaaggggcttttgattttaaaaccttttcaaaaccagttattgatactttagcgaaattgggggtcaaggctgagtttactggacgcaatgatcttgaaattgatggcaaaaaattctgtggcaatgcccaagcttactataagggacgaatgatgcatcatggctgtctcatgtttgatgttgatagatctgtcttagcagatgcccttaaggtcagtaaggataagattgaatctaaggggataaaatccgttcgtgcgcgtgtgaccaatattaatgatgagctgcctcaaaagatgtccgttctagaatttcgggatgcgctccttgaacaagttaaagaagaaaatccagatatgaccgaatatactttttcagaagcagaattggaacgcatcaagcagtcagctaaagagcagtttggcaattggaattggatttatgggactgccccagactatactattaagcgcagcgtccgttatcctgcaggtaagattacaacctatgccaatgttgaaaaatcggttattaaagccatcaaaatttatggagatttctttggtatcggagatgttgccgatattgaagagctgcttgttggctgtcgctatgattataaggatgtcctagaaaaacttaaaaccattgatacgacgcattatttcacacgaatgacaagagaagaagtggccaaagcgattgtggcctaggcctaggttatgtatcatttatattatttgaaaagatttcgtttcacatttgagactgactttaagaagtggcttattgtcaacttttagggaaataattcatttggtgaccgaggtcttttttcatttctgtcaatggcaggtgttttaatacaggcaaaagctgctataaatttttcttatagaacttcataagaaaaataaattatgcaaggccaaaaagagatgctattatagttttaaattggagaaagctggtaaaagatgtcagaaggaatttatgagaaattgagagaaattcggcattatcttcatcaacatcctgaaatttcagaaaatgaatttgaaacaaccgcattcattaaaaagcatttgaaagatttgggcattgaacctcttgcttatcctttaaaaacaggcgtcattgcagaaatcggatcgggtcaacccattatagctctgagggctgatattgatgctttgcctattatcgaaaagacgggtctcgcttatgctagcaagaatggtgccatgcacgcttgcggtcatgactttcatcaaacgagtttattaggcgctgcccaaattctcaaggaaagagaggcagaaatcaaagggactgtccgccttatctttcagccggctgaagaaaattttcagggtgcataccaagtgattgaagcgggtggtattgaaggtgtttctgctattatcggctatcataataatccgcatttaaaaccgggtcagattggtcttcgctcaggtgcaatcatggctggagtcgagcaatttgaagtaactgtggctggtatcagtgcccacgcagctcgtcctgatttaggagtagatacggtcttggcaatcacgaccatgattcataatttgcagcagattgtctcacgtacggtttcgccatttgattctgccgttttatcagtcactcatattgatgttggtacaacttggaatgtcctgccagccaaaggattttttgaagggaccattcggacttttgatccaaagattcgtttagctgttattaataagtttaccaaaatcgtcgaaacaacagcagaacaatttggtgctcaggtttctattcagtggggaaattcaccaaaagtgacttataatgatgctactttgacgcctcttatttttaaaaattccaagacatttgctcaggtcattgaaaccttgccatcaactggcggcgaagattttgcagcctatcaggaaaaaatcccaggtgtctttgcctttgttggttcaaatggtgctgacaatgccccagactggcatcatgatgattttattgtcaaagatgaagccttaccgactgctgtcaattattttgttgaaaatgcttttaaactactagaatattatagaagctgacaggaaccttttatatgtgtcctatcaaatagacactagtaaaaaaacgttatcgcttaatttcaattaaaaaattcccaagactgctgttttatgctcttgggaattttaacttcctaaaattgatttgattgtgttagtccttctaggtaacgttttttctttggaaataggaaagaaagcactaagaaaataagtaggcaagggatccaaattttgtagatagaaatgtaagcttctaccatactggagtggttatattgacttaaatttgccatattattgctaaccattgagataaaaacagtgacgcctagaacagagccaatctgtctgacgactccaataacgctttgagaggcggtgagcagttcaccttgtaaagttgatgccgctaaaacattgacaggtccagcaataataccaaaaccaattcccagaattaaggttgtgagagccattgccatcactttatttggattgatgctgacgattaaaaggtaagaaagtaaaatagcggtcagacccacaaaaaccagcaatcttgggcccaattggttaataaccagacttcctaaaccaccgcagataaagaccactaaggacataggcagtaaaattaaggccgcatcaagttctgtctttccttgaatagttgtaaaaaaggttggcaaaatcacgataacgccaatatagaaaaattgcgctaataaggcgactaatgctgaagctgtgaattctctaatcttaaatagattcaaattaatcatcggactcttactgtgcttttcaaggataataaaggcaaagagactaagcaaaaatgttatcaaacagcctaaagtgcgccagtcacctgctccccaatctcttattttaattaagcccaatgtcactaaaaagagacctagcattgaaataaagctgccagcaaaatcaattttggactcaatcttttcctcacttttaaaatgataagataaaatcatgaggcacgttgcgattatgatgattggcagattaataaagaaaatccagtgccaagaaaaggtatcagtaagaataccgcccaaagtagggccgatagcagcagcaccgccctgcatgagaccaagagcagcaacaattttaaagcgatctttaacctcccaggaagaaatccctaaactgttacctactggaagtaaaatagcggctccaaaactggagatgatacgtccaagaattaattgagaaaatccattagcaagcccagacagtaagctgcctattccaaagagcaacagaccaaggacaaataaccgacccttgccataaatatcagcaatcttacttaaaggaatggtacaggaagcaaagatgatggtataaacattgatggtccaagagagttgatccagttttactcctaagcccttttgaatagccggtaaggtgatgttcataatagtagtgtctaacattacgataaaaatccctaaacacatggctattgttaacatgatttttttagtcatagtgacctccttttaaaaaatgcgagcatatgctcatgtttaattgtattcttggaaaagacttttgtcaataaataaatgagtttttattcatgttttttcaaaaaacgttctcttaaagaaagaaaaggtgtgatataataagaaaaatgagtaattttgaaaaaaggaataggaaaatggcagaaaaaaatatcagaaaacccaagcaagaaagaagtattgaaaagcgcaacaagatacttcaagttgctaaagatttgttctcagataaaacttattttaatgtgacaaccaatgaaattgctaaaaaagctgatgtctctgtagggacactctacgcttactttgccagcaaagaagatattttaacagcgcttttaaaaaggtataatgacttttttctgacaacaatttttgctgatatcaatagtcaagattctttagataggttcaaaaagaaccctaaggaatggctgaatgttttgattaatcagttattggctgcagaagataaaatttttcatgctcaaattgagatgttagcctatgctattccgcaggctaaagccttactggaggagcataataataacttgaaaaacttgacctacaaatgtcttttatattatagcgatcaggctgccaatccaagctttaaaaccttgtctcttgtggtctttgattttatttcagctttggtagatgaattgctttatcatgagcacacgcaagaagaagcacaccaaataaaaaagactggcatagacagtcttgatctgattattaagtcttatttatagtcgtttggtttatgttttaggacatcttcgtaacttgccttacctaactcaggttagatctgtcccactttggctagatgagatcgcttgtttaccatcaaatgtgcaacggctcagtgctaaaagcgaatcaaacgataatacagtaacttgtcattttttaaaagattataaaaggggagtaggcctaattaagatttcagagaaatcaattttgcctacttcctttaatcatttcataagctttagcaatgatggattaatttaaaatgattgagcgattttatccagcagatcaactaaatgcctgatatcaggtgttaaggttgaggattttaagtaagcgtagttaacataaaatcctaatttattattttctttaaaaggaattttgaccagatgatgatcctgtttggttagtgagatatctgttaacaaactgacacccatattgtggctgaccatttgcttgataagagtaacatcatcagatttgaaaaaaatctgagcctgattttgatgggtttgattaagataatcaaaggcctttagatggatattgtgttcatctaaaagaataaaattttcctttaagacatcagcaaaagcgatggctttttttcttttagccaataaatgatctttagaaacaatcagatagagtttccgatgaagaatttttttgataactaattcatcatggtaaaaaggttctattgtgccaattaaactgagatccagatccccctgtaatagttgctccaataactcaacagaacctcctcgaatggaacgaatacgtttcagaaaagctaagtcttgattggtttctttaagcagcgacagtaaataattaataataatgggtgggcatcctaaggtagaatagtgagccagtgaacggttcatctccttttgggcagaactaatttccggcagaattctctcaaggtgacgcttcaaaatatttccttgttgcgtcaaagcaaaagtacgatgagagggatccttaacaataaggtcacaattaaattgttcctctaatcttttgacagaataggaaacagaaggctggctaatttgaaatttttcagcaaccttagtgaaggactgtaattgtgacaggtgataaaaatactttaaatctttaatattcattgttaacctttctattatttttactagtttagcatatttttggcatttaggtattttaaagattgttataagtattttttatccgttatctaaggtttgactataaggccatttgtttcatacaatgaattgtaaagtcaacttccaagtggtttaaaagtaacaagatagtggttttttcttttgctcttaatcaagattatcaataatctcttcaaaaatagcaatgaaggtttgttgttttctcttgggaagttgctttattttcatattaaggcgttttaaagttaattgtttctcgaaattgattgttccttcaagactgttaaagtcaaaaaaatcttccggtgtcatacctagtgcttcaatcactttttcaagcgtctgcaagctgagattatggttttgattttcaatctgattgatatatttcaatcctaatccagctttttcagacaaactttcttggctgatgccttgtgcttgccgatgataccttactttatttgcaacatatttttggagatagctttttttcttcatacattaaagaatacaagtttaaaagcaaatagttaactttttatacaatactatgtattatatgtaatacattttatgttataatatgatcaataaatataaggaggtgcagaaaatgtatgcacatgacattttaaacgatccttttttgaataaagggactgcttttaccatggaagaacgtaagaaatttggacttattggtcttttgccccctcacattcagactcttaaagagcaagcagagcagacttatgcgcaaatgcaaactaaagctaataacttggaaaaacgtcttttcttgatggagatttttaataccaatcggacacttttctactatctcttctctcaacatttggaagaattgaatccaattgtttacgatccaaccatcgcagatacgattgaaggttacagtgacctttttgtggattctcagtatgcgggttacttggatattaaccatcctgaaaatattgagactaccctcaaaaatgcggcaggtgaccgtgatattcgtttgattgttgtgaccgatgccgaaggtatccttggtatcggtgactgggggactaatggggtggacatctctgttgggaagctcatggtttacacaggggcagcagggattgatccagcaactgttttgccattggtgattgatgcaggtaccaaccgtgaggaattgcgcaataatcctaactatctggggaaccgtcatgaacgtgttcgtggtgagcgttactatgacttcgtggatcaatttgtccaaacagctgaacgtcttttccctaaactttaccttcactgggaagacttcggtcgttcaaatgcggccaatatcttggaaaaataccgtaaggaaattccaaccttcaacgatgatattcaagggactggcatcgtaacccttggtggtatctttgcggctatggatatcacagatgaaaaattgactgatcaagtctatctctgttacggtggcggtacagcaggtgcgggtattgcctctcgtgtcttgcgtgaaatggtttcagaaggcctgcctgaagacgaagcctacaagcgtttcttcatggtggacaagcaaggtctcctctttgacgatatggacgacttgactcctgaacaaaagccatttgccaagaagcgggcggattttccaaatgcagatcagttgacagacctcttgcaagtggttaaaaccgtgaaaccaaccatcttggttggtacctcaacaaatccaggtgccttcacgaaagaagttgttgaagctatgtgtgaaaacactgaacgcccagtcatcttcccaatctctaatcctacaaaattggcagaagcatcggctcaagacttgattacctggtctgatggtaaggcctttgtggcaaccggtatcccagctgatactgtatcctacaagggtgtggactatgtcatcggtcaagccaacaatgccctcatctaccctggccttgggcttgggatgttggcatcagaagctagccttttgacagatgaaatgattggagcggcagcacactctctcagtggtatcatcgatatcaccaaaccaggtgtgccagttcttcctccattcaaatatgtgggtgatgtgtctatcaaggtcgctgaagccgtggctaagaaggcacaagaacaaggtcttgcgcttgctgaagaaaccgatatggctaaggctgttcgtgactttaagtggtacccagagtattaatcatctaaatcggacggtgccatcaagaatatttagagtataaaattagcaaggcgctcctagatccctagaacaaaaggacagggcgcttcttgttagcagacggaatgtgttataacttgccgtgtttgttaaatgatcaagaaaggaaacctcatggatatctttttaacctcaatttcgagtattattcccatcattgtgattattgtactcggttatgcccttcaggtgcgtggttggtttacagataattttggccccacactctctcaccttatcatgaatgtggcgctgccagtgtccatttttgtgtcggtccttaagtacttgactctggataagctagttagtctgtcaggtggtctgctctacacctttggtgcctttattctaacctatattttagccttcctagctgtaaagatttttaaggtccgtccaggtcgcagagggaccatgatcaatacctttgtcaatgccaacactattttcatcggtctgcccttgaatgtagcactctttggcgatcgggctctgccttacttcctaatttactatattaccaataccatctcaacttggactctaggtgtctacctcatgacgacggatagcaagtctggtaaaggaaaagcgaccaagtttaattggaaaaaccttttgccagctcccctcattggtttcttggtagccttggtcttcttgattctgcgcattccggtgccggactttgcgactagcacgttgacctatattggtaatatcgtgacacctctgtctttgatttatatcggtattgttttggctaaggctgggcttaagagtatccactttgaccaagatactattgtgactctggtgggacgctttatcttagcccctatcgttatgtttggtcttctttatttgacaggaaaaggtctgccagtgactgagtttaagacttttgtggttcaatcagcagctccggcacttgcggtcttgccaattcttgccagccaaggtgatggtgatgtcgaattttcaactaatgtcgttaccctgagtacagtactctttgtaattgtcattccgattgttgtgaccttgatgggttaaggtcgatataagccttaaagtttataatccataaaaggggtgtacttcttttaaggactattgctattcacttttgttctttcggacaacttattgttatcacaaggaggaaaaaacattatgacaacacccaacaccccacagccgcaaagaaaaagcgacggaaaaggttggcttgattttggaccgcgtaacttgagccgcgataatgaaaatccggatatcttggttccgcctgtcactgaccatgggaccatgcccaatatgcgctacagcttttcagatgcccacaatcggatggaagaaggaggctgggcgcgtgaagtgaccattcgtgaactgcctgcttcagatgaattggctggtgtcaatatggccttggcaccaggtgcttatcgtgaactgcattggcacaaagaagccgaatggggacttatgctgtacggcaatgcccgcattacagcgattgacgagaacggtcagtcttatattgatgatgtcgaagaaggagatctttggaattttgaatccggcgttgctcattctattcaggccttggataagggctgtgagtttctgttagttttcagcgaagccaatttctcagagaatcaaaccttactgcttagtgactggttggctcacactcctgatgacatcgttgctgctaattttaaaaagaccgaggaagaattggctagtcttcctaagacagaaaaatatatctttaatgggactattcctggttctattgaagcagagaagcgcaccaatcccaatggtgatgtggtcaatccgctgacactgcatttggataaagttgcaccgattcagtcagaagctggacgtgcttggattttggatcagaaggtctttccggctgctaagacgatttcagcagctattgttgaggttgagccgggcggtatgcgggaattgcactggcatcctaagtcatccgaatggcagtattacatcaagggtcaggcccgcatgacagtttttaattctaatggtttggctcgtacctatgacttttcagctggagatgtaggctatgtacccaatgtagcggggcattatgttcaaaatacgggtgacgaaacgttggtcttcgttgaagtttttcgtaaccctgattattccgatatttcgctcaataagtggctggcgacaactcctgtcaataatgttgcagagcacctcaatcttcctaaggaacttgtccaaaatcttcctcaggcagagactccgcaacctgtcatttggtttgataaggataaggctgcaaaaaagcctttttagacaagcccatactgagtttggacattaaagctcagcagggctatgattatgatgtcattatcatcggcggcggtgtttcaggtgtgactctagcctgcaacttggccgcagccggcaaaaagacagcgctcattgaggctagagattggggagggacaactgtcaatcgcggctctacccctaagaaggctcttttagcactagctgaattgcatcatcatcaggagagctttctacatagaggtctggagacagtctctcacgtcaagtgggaagatgctctgctgacgcgggattggctggtttcagatgagtcagccagagcgaaggagagagctatcaaagcaggtgtagagacttatgaagcctatgctttctttgaagatgctcaccatctaaaggtaaacggtcaggtgctgagcactgcaactattgttttagcgacgggctctgtgcctcgaaagattgacatagaaggggcttcttacattgatagcagcgctaatcttatgcgaatccatcagcagcccaagataattgccttgattggtgctggtgtgattgccatgtcgctgatttcaagctttactgagctgggaacaaaagtccatgtcattcagcacaatgatcgtgttctgggtaattttgactcagaacttgtagatattctggtcaatcgtttgaaaaatcgcggtgcagaatttcatatggaagcagaagcagagcgtgttgaaagaagtgcttcaggctatcaggtaaccttgacgaatggggaaatagttattgttgacggtatttatgatgttgccggtcgaattgccaatatcggcggtctccaattggaaaaagccggcatagaatataccgagcgcggaatctctgttgatgatcatctgacgacatctcagcctcacatttttgctatgggagattgctgtgatgcaccggtgcctaagctgaattcctatgcggattttcaggctaaatatctgagtcagctcttaaatgatgctatccagtatccgatagcgccggcggcaactgtctacagtattcccaaaatcggtcaggttggtgtcagtgttaatcaagcacggcagcatccgcaggactatgacgtgacacagctaaacatgtctaattggcagaattacaaacgcgttcacgatgatttggctgtcatcaaactagttgtgtccaaatcagatcagcatgttgcaggagcagaaatcgtcagtgacacggcagatattctagtcaattatctagctattttgctcaatcgcagagtgagttttcaggagttgcaggatatcatctttgcttatccgtcactggcgacagatttatatggtttgtggaaataatatgcaggattcgaaactaaaagaactagaagacgaagtcagtcgctttggaacacatcaaataaaaggcattgcttattttcttactctgcttggcggagctattgatgcggtttcctatatgggttttgatcataccctgccggctgctcagacaggaaatcttcttcttttaatggtggatatcacgcgcctgaatgtacaagggattgccataaaaatgactactctgctgagcttcatagcgggcttggtggtcagtcgctgtgcttaccactattataggagtatctattggcgtatttatatcttagtggggttatcggctgcttgtctctttactttcctagcttttgaccatcttccaagtggccttgctattgcacctttgtcctttacattggcaatgacgacaggggcttttaataaggttgaaaatgaactttataacaactcgttcaccacagggaatatcaaaaaagccatcattgcttggtgtgagttcctttttaaaggacaggcagagcacagaaggagcgagctgtcatttttacttgcctggttctgtcctttgtcataggggcatttacagcagccttattttatttcttatttgggatggctgccttattagttatactatgcgaaattatcatttttacagtttgctacttcttgctgatcagattttcacagaaatcctaatgaaaatccctgagtttaaattcaaactcagggatttttctataatgtaatcatatgtgaatgagctggctttgttgacagtcatgattagccaaaacctcaatgccgtttggcttagcagtgttccagtctcttcattaaaaatgaggatggttaagtaccatcactcaatcaaaagtaaaccttcttttatttcaaaaggatttttttcattaatgcggtcaaaaaacataataccgttggtatgatcaatttcgtgctggacaacgatcgactgatatcctttcagtttgagcttctttttgtcgctgttcttgtcatagtattcaatagtgacacgggaatggcggataacatagccttcaaccacgcgatcaacagataaacacccttcaccatcagctaaggcagcatcttggacagaatgggcaatgatgcgagggttgtacataacttctttcaaggcataggcttctttaggcggattgccgtctttatcttctggattaggaatgagaacagcaatgatgcgttttgaaatatctaattgcggagcagcgagaccgacaccgccgcgcagctccattttttcagcagtcacgggatcttgtgaattttttaagaattgcagcattttttcgcccaaaataatatcatcttcatttaaagggaaggtgacatcttgagcgacagcgcttagggtaggatgaccttcgcgaataatatcattcatatcaattaaatgactggctttagtaatagttttaatagcagacatttttttctccttgtttttacaataaaataaatatagcacaaaacggggcataaataaagttagagaaattagccttattctttaatttgccagcgtttaagttgttttagattgttaatataataataaggcttttgcttaccaatgacaccaagagccataaattcctgaatgacacgcagcagatggcggtagctaaccccaaaagagtcagccaaggtgcttaattctaattggaaaatcccatctttttgaatagatagaatatgactggctaaacgttctttgactgtataagagagattggttgaagccttaatattttgttggtagagtgaataagctaagccctgtcccaatttaagaagaaaaagaggatcttttaagagtaattctttattgctttttagcggcaattggacaacccaagatttttcaagagctactactgaagaaacggttccttgatttgttagcagttcaatatctccaataatggtaggtttttcctgaatattaagaatatgttccttgccattaaacagccgccggacaatcttgattttacccttgacaaaataagaaagagcctgtaattcttctccctgctgacaaatggcttggccagctgaaaaagaaatcatttgcagtttatcaaagtaatgggcaggaaaaatcttttctaactgatacttttgaatccattcttttttgggagccacaagtttcctcttcatcatttatgacatatgtcatatttttctttgttaaatttgattatactctctttatcagaaaaaacaagttttgtgtttaaggagttgttatgaaagcgttcatggagaaatttagtctcttatccttatcgttaatgctggtgtccacttttgccgtttcaccggcactttctaagatgctttctttttatcaaacacgcggttacagtaatgctcaagttgaattgctgctttctttatcttcttttgctatattagcggtcttactgctgaatccttggatcaatctatggctgtcggaacgctggtctattattttaggcttgcttttgctttctataggcggtattttacccgtttttctgcagttttatcctttagttttcctgtcgcgtttacttttaggtttgggaataggtcttattaatgcgcgagcgattagtatgattagcgaacgtttttcaggcaaaatcagagttcaaatgttaggattaagaggttcggcagaagttctaggatcagctattttaacctttttagcagggcagtggctgaatgtttcctggtcttttgcttttttaatttatggatttggctttcttattttattatgctacctcttatttgtgccagcagctaaagaaaaaagagagagttcccaaaggcagatgtattcaactgcttctaagaatcattttaccttccgtcagctcctttatatttttggtttggctctctatgctggttttgttattttggttaattctgctaataccctacggattcctcttgttgtggagaagttacatttggcaacagccagtcaagccagtttcattttaagtctgatgatgttgatgggcattttggccggcacactttttagttttttgctagctttatttaaagattacctaatgccgctagttgtattcgttttgggtttgggtatgctgatactttggcaggctaatcatttatggcttttaagccttggagctttggtgaccggttttgtatacagtttaggcgttaccttggttttccatcttctttcagaacatatgcctaggaaacagttgacaacggcgacaaccttgattttgattggctgtaatttaggcggcggctgtgcttcttttgtcctgcagctgtttgcatgtattaattcagatgtaaaagcagcctttcttatttttgctgttttgagtttgatccttggtactttattgctgataagagtgcttaaaacaaatagaaatctcagaaaataatctgaggttttttaattttcaataatttattagccctcacacgatcaagattttcaaggggataaaaatttgggaaaaaattcacaaaaagacttgcatttttttgtgaaaagggttacaataacaagtgaagaaaatcacaagagtatctttcttcttaaactatttaccaactattatttttaggaggaattgttgaatggcaaaagaaacaaaaacagaagcactcactgctgaagaagcagctaagcagtatacgaatagcttagttgaaaaagcgttaaaggctgaaaaaatttatgcaacttatacacaagaacaggtagataaaattgttgcagctatggcgcttgctggttctgaggcgtccttgcagttagctaaagaagctcacgaagaaacaggccgtggggttgtcgaagataaagatactaaaaaccactttgcgacagaatatgtatatgaacgcataaaaaatgaaaaaacggttggcatcattggtgaagataaagttgctggcagtatcgaaattgcagcaccacttggtgtcttggcaggtatcgtaccaacaactaacccaacatcaacgactatgtttaaaatcttagtcgcattgaaaacacgcaatgcaatcgtctttgctttccacccagcagctcaaaaatgttctgctcatgccgcccaaatcttgtatgacgcggcggttaaagccggcgctcctgaaaatattgttcaatggattgaaacaccatccatcgcaaacacgggagctttgatttccaacaaaggcattgcttcaatccttgcaactggcggacctggcatggttaatgcagcccttaaatctggtaatccatcgatgggtgttggtgcaggtaatggtgctgtttatgtggatgcaactgctaatcttgaacgtgcggttgaagaccttcttctttctaagcgttttgacaatggtatgatttgtgcgactgaaaattcggcagttgtggaagcaccaatttataaagaatggcttgctaaaatgcaggaaaaaggcgcttaccttgttcctaaaaaagattacaaaaaatttgaagattttgtctttaatgacaaccatggtgttaacggaccggttgctggtatgtcggcgaaatggatctgtgaacaagccggtgtgacattgccagaaggcaaagatgttctcttatttgaacttgataagaaaaaaattggtgagaaattatcatcagaaaaactctctccgcttctttctgtttataaagccaaagatcgcaaagatggtattgatattgtagcagctcttcttgattatcaaggtgctggtcataactgtgccatccaaattggttcacaagctgacccatttgtcgctgaatatggagatgccctcaattcatctcgtgttttggttaaccaaccagactcagtcggtggtatcggtgacgtttatacagacgcattgcaagccagcttaactcttggaacaggatcatgggggaaaaattcattgtcacacaacttatcgactggcgacctcttgaatgtgaaaactgttgcgaaacgccgcaaccgtcctcaatgggttcgtttaccagaaaaaacttactacgaaaaaaatgctatttcatacttgcaggatgaaactgaaacaatgacgcgtgctatcattgttgccgatccaggtatgcttcaatttggttttgttgacactgtccttgctcagctatcccttcgggatgaaaaagtcgcaacttcaatttatggtactatcaaaccagatccaacactcggtcagactattgaaattgctagacaaatgcgtgacttcaaaccagatactgttattgcagttggtggcggttctgcccttgatgcagccaaaattgcgcgttatatctatgaatattcgttggatcaagaagcagatttccttgatagttatgaaaaagtcagtgagctcttccttgaattgcagcaaaaattcattgatattcgtaagcggattgttcgcttcaagcatcagacagtgactcgtctcttctgtatcccaacaacatctggtacgggttcagaagtgacaccttatgccgttattactgatgatttcacacacgtgaaatacccattgactgattatgaattgacaccgcaagttgctattgttgatccagaatttgtcatgacagtgcctaaacgtaccgtagctctttcaggacttgatactttgtcacatgctcttgaatcttacgtatctgttatggcatctgatttcacacgtccatggtctatggaagctatcagattggttatcgaaaacttggaagattcttataactttgatcctaagaatccaacacttcgtggagaacaagcacgtgaaaacatgcattatgcagcaactttagcaggtatggccttctcaaatgccttccttggaattaaccactcactcgcccacaagactggcggtgaatttggacttcctcatggtcttgctatctcaattgctatgcagcatgttattcgctacaatggcgttgcaggaaatgtgaaacgttctgtttacccgcgttatgaagaataccgtgcccaacgtgattatgcggatattgctcgcgctcttggacttaaagggaaagatgatgcagaattggttgaagcactctgtgcacgtattgatcaattaatgcatgctgtagatgttgagcctaagttatctgctaatggggttactaagaaggcttttgatgcagctgttgatagattggcaagcttggcttatgatgatcaatgtacaccagctaatccacgtcagccttacattgaagagatgaagcagctcttgattgatcagttctaagttgatatcgtttagcagtcaggcccgcttatgcgggctttttttgcctctcgaaaaccactagctatgctagtagttccggaaacttttagcgtagtaagaaaagaacctcctaaaatgataagatagaagtggtttccccgccactactaaacatcacaaaggggatagctcatgagagaggctaatgaaagtttatcacatacaaagtggaattgttctaccatattgttttcgcactcaagtatcatcgtcaaatcatttatggcagatacaaaaccagtatcggaagaattatctgggacttatgtgaacgcaaaggcgtgaccattcatgaagcgaatgcctgttccgatcatattcatatgcttgtcagtatcgcttccaaattcagtgtttcgtctttcatgggatatttaaagggaaagagcagcttgatgatttttgataagcatgcgaacttaaaatacaaatatggcaatcgaagttttggtgtagaggctattatgtagatacgataggtcgtaaccagaaagtgatagctgaatagatacaaaatcaattacaagaagacagagtagcagaccagctcactttattcgagggagtagatccgtttactgatgaaatgaagaagaagtaagtcgaggtgctttagcagctgctcgggaaagaggtgcgaggaagagctatttcggtgggcctttggccctgaccggtagaagtggcttacagtcgcagaacaaaccaccagttcacactggtggttttgattgttagcctatcttattttcccaaagcttgtgtaaaacttctattaaacagcaaaaagtaatcttttccttaggacacataatgtaaaattagctggtaatgatagtttcagaacatcaaaaatgaccgtttaagacaaaatagctaccatttaggatattttgctctattttgaaaataaattgttatactaaagatgtcggttgcgcagccagacaaaaaactaaaaatggaaaaggggtacttatcatatgaatacacaggcatttgaacaatttgatgtaatggacagccaaacactttcaactgttgaaggtgggaaggtatcgggtggagaagcagtcgcggcaattggaatatgtgcaactgcttcagcagcaattggaggactggcaggtgcgactcttgttaccccatattgtgtaggcacttggggactcattcgatctcattaaagaattaaatggaatggagaattaataccatggaattaaatgtaaataattataaaagtttaactaatgatgaattgtcagaagtttttggtggagataaacaagctgctgatacgtttctttcagcggtaggaggagctgcatcaggattcacctattgtgcgtcaaatggtgtgtggcacccatatattcttgctggatgtgctggagttggtgcggttggatctgtagtttttccacactaaattgatataatggtgggcaatgtcaattcagggcgagatttctgaatgggtacagtggaattgtccatttttcgcccaatagaattttttatttaagctgggctataactattagaatattaagtattgacttatatactgttaaaaagatttatattatataatgtcgaatttcaagagagagaaaaaataagatgaagaaattagagcgtatctccacaaagattttgcgttgggcctatttaatcttaacaaccatagtttttgtagctgctctgataatatataattggttatattatgggaaatccatacttttttggttaccagcagttctagtattattagtaactgttttgttagcctacttggtaaaaaagcaattggaagcgaggcttgagtccttattaattttcaatacacttcagcaaattattggtgtattaatcgccttagctgtaggcctttttgcactggcatacaaagcattaaatactaaaattaatgatggtaatgaggtctattggatactttttgctgccatcttactcatcttttcttggaatgctgttgaactctataaagagctaaaaagaagaagcaagaataagtaaagctaaggccgaagcctaatagttgtcttaaatattctgttattatcgtaattcttattgcttctactaattatggaggaggattaactatgatagttaatttttatcaatacaaagaactgtctaatgtaaaattatcagccattaagaacatcggcaaccacttgaaaagttgtctttaaaagcgaatcaattataattacaagaaaacgaaaggaaaagttatttatgaatcgttacaactcattattatcattttcagtgcagctttgttgttagtagcagtggtggtacgtctcaagacttatataacaaggtgttccaacctacagatattatgactaacaactcctaaaatgtcacatctagccaacaacctcacaacagcggcagcgcaacagaaacggctgagcaatcaattctgcaggtacaggtgcgacaccagatgatatctcaataaagaccagtgatcaaccgcaaacgaaagaaggaatgaaaccagaaaaagaaaagttggatactaatactttaatgaaagttgtcaataaagctttgtcactttttgataggctattgattaagttcggagcttaaaccattactcgaaaaaatgcccattttgaacatctttttggtagttgatcaactgtagtgggtgacgaaaaattaagtcctggagagaaccaatctgtactgatccccaaaagttgtactatttattatttaaaggattggacttgtcaagaaaaagtagacaggaagttaagtgaattagagagggatggtttgattagtcgtagagattatcagcagatgcctcctaaggtcgtctattctataacagactatggccgtactgctaatacgattattgatgtcgtgtgccattgcagagaggacaatatcaggcggcgtcaaatattaggcgaagaaatcgacttaattccgtacgacttttaagaagtgactgttcatttgtaaaaataacatatattaaactatgcttcgctttatatccagatctatgttcatatgtaacgcagaatttatgactgcgaaagtgcaacaatttttaatagaatattaactgatttgtacgatatagtaaaattaaacattattccagtagccgtttaaaaattctattatgtaataaatcatatcagctaaatatagggtaatataataccaaaaaaagaaaatcagttgacgttaattggctattttgctaaaataaaaactgtcgtagagacaagaaactttttcttggttctaggattcgccaaaacctaggactcagattaaggataaaaaggagaactattatggcaatctcaaaagagaaaaaaaatgaaattattaaacaatacgcgcgtcatgacggtgacacaggttcagtagaggtacaagttgctgtccttacttgggagatcaatcatcttaatgaacatattaaacagcataaaaaagaccatgcaacttaccgtggattaatgaaaaagatcggtcatcgccgtaatcttttagcttaccttcgccgtacggacgttaatcgttatcgtgatcttatcagctcacttggacttcgtcgttaattggagtgagaaagtggcttataatcttaagcgtagcttgattaaataaaaaagctgtccattaggatggcttttttagctgtagcaagtcaacatatagtataggacagaaaaggaaaattttaggaataaaacacgttttgaaacctttacaaatgctattgtagttattgttgtaatagttttggtgttagaatcatcaaagcctgttggttctatcgtgcgggctgaaatggctttttgaagttgtcataatatcgaaagagtattggagtttaattataaggtataaagtaagataccaatgattcaacactcatttataaacgctaaaatagataataaagcccttgttaggtatctaattttagtaagggctttatagttgataagctcaataagaaagcattgattatgatgaggactcaaatatcgctggatgcctacctctattccttagaaattgaggttttctggtaaatttagctttttctagtctttttcttttccctaaaaatatgttaaaataaacgagatacgtggttttgtgcaaagttaagggagtaagatagagctgtactgttgtcagttatcgctgggattgttgaacttttgcctagcaatatcgttgacgagaaaagtaatgggatatggtgctgtatttttgatacattgacgttagagtgataaggcttatttcttaaactttgtggaaaacacgtagactaatttttcaggagaaacttatgtcaaaacaagtgtttgaaacaatttttgctggcaaaaagctggctgtagaaatcggtcaggttgccaaacaagccaatggtgctgctttggttcgttatggtgattcaacggtcttgagtgctgcagttatgtctaaaaaaatgtccacaggcgatttcttcccacttcagattaattatgaagaaaaaagatacgcagctgggaaattccccggtggttttaacaagcgtgaaggccgtccatcaaccgatgccactttaacggctcgcttaattgatcgtccgattcgtcccatgtttgcggaaggttttcgcaatgaagtccaagtcattaatacagttctgtcttatgatgctgatgcgagtgctcctatggctgctatgtttggcagttcactagcactttcgatttcagatattccttttaatggcccgattgctggggtacaagttgcttaccttgatggtcaatatgttattaatcctacggctgaagaaaagaaagcttcacttttagaattgactgtcgccggaaccaaggaagccatcaatatggttgagtctggtgctaaggaattatcagaagatatcatgcttgaagcccttctcaaaggacatgaagcggtacgtgaactaattgctttccaagaggaaattatagcagctgttggtaaagaaaaagctgaagttgaattgttacaggtggatgctgatttgcaggctgaaattgttggaaaatacaatgcagaccttcaaaaggctgtccaaattgaggaaaagaaagcccgcgaaattgcgacagaagctgtcaaagagcacgtgactgctgaatatgaagaacgctatgctgaacacgaggaacatgaccgtatcatgcgcgacgtagctgaaatccttgaacagatggaacacgcagaggttcgccgtcttatcacagaagacaaggttcgtcctgacggtcgtcgtgttgatgaaatccgtccgcttgatgcagagattgatttcttgccaaaagtacatggttcaggtctcttcactcgtggacaaacccaagccttgtcagtgttaacattggctccaatgggagatacccaaattgtggacgggcttgacgaagaatataaaaagcgcttcatgcatcattataatttcccgcaatattcggttggggaaacgggacggtatggagcgccaggacgccgagaaatcggtcatggagctcttggtgaacgtgctttggttcaagttctgccaagtttggaagtatttccctatgccattcgtttggtagctgaagtgttagaatcaaacggttcctcatcacaggcttcaatttgtgcgggaacgctcgctcttatggctgggggtgtacctatcaaagcaccagttgcaggtattgctatgggacttatctcagacggcactaactataccgttttgaccgatatccaaggactagaagatcacttcggcgatatggactttaaagttgcaggtacccgtgaaggtatcacagctttgcaaatggatattaagattgagggtattacaccgcagattttagaagaagctcttgcccaagctaaaaaagcacgttttgaaattcttgatgtgatcgaaaaagtcattcctgcaccacgtctagaattagcaccgacagcacctaaaattgacacaattaaagttgatgttgataaaatcaagattgtcattggcaagggcggtgaaaccattgataagattattgaagaaactggcgttaagattgatattgatgaagacggtaatattgctatctactctagcgatcaagaggctatcaatcggactaaggaaattattgcaagtttggtacgtgaagctaaggttggtgagatctatgaagctgaagttgtccgtattgagaaattcggtgcttttgtgaatctttttgataagacagatgcactcattcacatctctgaaatagcttggacccgcacgaataaagtagaagatgtcttggctgttggagataaggttacggtcaaagttgttaaggtagatgacaaaggccgtattgatgcttccatgaaagctttattaccacgtccgccaagatctgaaaagtcaaataaggaggaccatcaatctgtcagacatcacggttctcctaaagacgataaaggtaaagaaaaatatgataaataaatttaataaagaacttgatatggcactcagaagttttatcaaggaacctgataattttttaaatagtttgacgcttgttaatagtcttcattctttccctgttttggctagtgatcagccttatgccatcgcccttgatggtcaaaaagtgacgccagtctttacagatacggaagatttgaaactttttaaagcacagcaaacgagtgccagaaagcaaaattgggtagagcgtcctagtctggatattttagaagaagttattgtcaatcgcttgaatgggatagtctataatattaaaagaacaggtgattttggaaattccacgattttcaaaagtaatgaattggtgcaatttatcaataattacactgttattctcaacactgtttttaatgagaccaatcaagaagctgatatcttagataaatattatctagtaccagctttcattcatcctaaagataatgatgattttgataagggctttcctactatgtcaaattcagatggagaaagctatgttcctatcttttcgaatttgccaagttttgttaaatggtatcatgataaagaatttggtcttcctttcagagaagcacaaggtgttattatgacttggaaaattgccgatattcaagaatcagaaacgaaagcctcaacgttaggagtagtcattaatccttttgatgacaaacaaattgttgttgaatggtcaggtatggaataaaggagatattatgggttggtggaaagaaaccattgatattgttaaagaaaaagatcccgcagcacggacggcgctagaggttcttttgacctacccaggtgttaaggctttagctgctcattgcttatctcattttttgtggacacaccattgtaaattgttggctcggatgcatagtcagttttggcgtttttggacacaaattgagattcatccaggtgctgaaattgcagaaggcgtctttattgatcacggttcaggtttagttattggtgagactgccatcgtagaaaaaggggtcatgctttatcatggtgtgacacttggtggtacgggtaaagagactggaaaacggcatccaacgattcgtcaaggagctcttatttctgcacattcacaagttattggtccggttgaggttggtccgggcgctaaggtgggtgcaggtgcagtcgttgtttcggatgttccagcagacgtcactgtggttggtgttccagccaaagtggtccgtgttcatggtcaaaaagatgaaacagctatccatgaaatcgaagagaaccgtgaatattacctcaaaaaactagaagaagctaaggaagctagttttcactcgtccgggctgtgatagtcttacttggctggttgtactttttaccaaagaaaaaagactcctaaaaaatgattggagaatagaatatatgataaaaatttatgacactttgacacgcagtctgcgtgaatttgttccaattcatgaaaatacagttaatatgtatgtctgcggaccaactgtttataattatattcatgtaggcaatggccgttctgctatcgcttttgatacaattcgccgctattttgaataccgtggatacactgtcaattatatttccaattttacagatgttgatgataagatcattaaggcagctgcgaaagctggtatgactaccaaagcgttatctgataagtttattgcagcttttaaggaagatgttgctgctcttggtgttaaacctgcgactgagaatcctcgtgttattgattacatgcaggacattattgattttgtccaagttttagttaacaagggctttgcttatgaatcattaggagatgtttatttccgtgttcgtaaatctgataattatgctgctttggccaataaaactttggaagaattagagattggtgccagcggccgagtggatgctgaaagtgattgcaaagaagatcctttagacttcgctctttggaaggcagctaaggaaggtgaaattgcttgggacagtccttggggagctggtcgtccgggctggcacattgaatgttcagtgatggcaacaaccattttaggagatactattgatatccacggtggcggtgctgacttagaatttcctcatcatactaatgaaattgctcaatcagaagctaaaacggggaaaaaatttgccaattactggatgcataatggctttgttaatattgacaatgagaaaatgtccaaatcgttaggtaattttatcactgttcacgatgctctcaagacaatggatggacaggttttacgtttcttctttgcaactcagcattatcgtaagccttttaattttacagaaaaagctattcgtgatgctgaaatcaaccttaaatatttgaaaaatacctatgaacagccttttacagctactgtagatgaggctgtatttgccagatttttggaaaaatttcaagcagctatggatgaggacttcaatacagccaatggcattacagttgtttttgaattggctaaatggattaattcaggtcattatgatcaaactgtaaaagataaatttgcagaaattcttcaaattttcggtgttgtttttaaagaagaggttctggatgctgagattgaaaaattgattgaggaacgccaaaaagcgcgtgcagcacgagattttactaaagctgatgccattcgtgatgacttagctgcgcagggcatcaagcttttggataccaaggatggtgtgaggtggatgcgtgactaggtcagttgacgttaatcttatcaacggaatcgcccttgcttttgagggtgatgccatttattctacttacattcggaaatatttgatttttcaaggtttgaccaagcctaatcagctgcatcacaaaacgactcgttatgtgtcagccaaggcacaggctatgttgataactaagatgttagaagcgcagcttttgagcgaaaaagaagaagatatttaccgtcgcggacgcaatgccaacagccataccaaggccaaaaatacagatgttgtcacatacaagatgtcaacaggatttgaagcagttatgggttatctccatatgaccgagcaaattaagcggctggaagagctgattgactggtgtattcagacagttgaaaatgaatatagtgaattgaataaaggttaggacatcgttatcgttaagtcgctttgatgaactccagctctattcttctgcttcttgccttgtcttatccttttttaaattccactataaaaacagttttcaatgaaggctgtttttttaccgcttgactatgaccttacgttatcctttatactgtcagtataggaggaaaacacaatgaccattcgtatcattcactcagataaaatttaccgtgagttgctgaaaatgcctgtagccaaaagaagggcttattttaaagaacaagttctggcgccttttaagcccaaattttacaaacagaatattccttacgaggcaaagcaggcggacggttttgacatcatgatgctgctttcttggatgcatctcatgcctgaaacgctgacggatcagcaccaagccttcattgactgtttagatgatggcttttggaaaagatgtgaccaagccattcaagatagtctagcaaggtttagttctttccagctgccagttcaagattatacttttacagctttattggccaatccagctgcccccatgttgcaaatcaatgatggttacagcggagatggtggtattccaggttatattttcttatctttggtgccccatttggataccttaaaccgtgtccaatctgcgctggctcacgagatcaatcataatgttcgctatcaatttattgattgggacggtggttctctgaaggagatgattgtagctgaaggtttagcagagaatttcgctgtacagctgtatggtaaggaaaagctgggtccttgggtaagtaagacagacttggagacgctcaatcagctggttaagcctttcttacgtgaacatcttgatgtaaggggaatgcagaaaatcactgcttatctctatggcgataaaattgctgctatgatgggtcaagacggagttggcatgccttattgtgcgggttacgcctgtggctattatctggtaaaatactacttagaaaaaacgggtcaaacaattgaagaagcaacgtttttgccagcttcagaaatcttagcggaggcggatgaattttggacagagactacacactaaaagaaatcatgaccattactggtttaaccaagcgaacattgcattattacgaccaaatcggtctcctgccagctaggaagttagcaaatggctaccgtcactatagtcagcaggatttgattgatttgcagcgcatcctttttctcaaagccttggatttttctattaaagaaatccagtccttactcaagctcagtgatgaggctctgcgtccgattttagaagagcagcagacacgcttggttcagaaaattcaggatttgcaaaaaaagaagaaagaactggaaaattttctggctggatcgccgctcattactttggatatttttgaaaaaccgttgaacgaccaatatcaaacagaagcagagcttcgttatgggaaaacatcggtctaccagacttatcaagaccatcgggcacagcttgattctactgaaagaactcagtatgatacaaaaatggagcagcagtttgaccaagtttttcaagaatttaaacgagtgagtcatttgccgctttctgcaacagaagtagcggcagctgttgaacagtggaaatcggctttcctgatgattggtgatttttcagatgaggttttggcttatattgcgaaatcttatgtctacgattcgcgttttaaacaatatttttctaaatatggcaattttgacctgacaagatttatcgccgaagcagtcacttattatttaacttagatagtgtaaaaggcaaaggtagatttctttgccttttacatttgttttattgaattgagaagttgcataccctctttttcctgcagtgaaagatcctttaataacttagaagcttctagaacatactgtatatcacctgtttttccagctttttcaaatagaagaacaagccgcgaccagtttttagcactatctttaacaatctcataagctattttgatagcagaatgtccagtccattcataggcttccttcaaaaagtcacggtaaaaattacgaaagagcgctccgccagtgcccgcacttttcatcagcagagcagacattgcaaattccttttgaatatctttagattgtttaaaccatttgatgatttctctgcttgctttttcaattcctttgtaaccaaaatttttaataggagggttaagataagtttcgctattatgacggacaactttcaaaatagctgtctcaatcggaatcaaagcagtttctttttcaaaaatataatacttgtttcgagatgacatgggacctttttcgtttcttgctaaggctagactttcaagggaagttatagtttttgttccttgctgtttagtgtcaacaaggtaagcctttttatcatcatagccaagcatcgcaacatgatgagcagcaaaatgtataggatttgaaaaataatccaaatgatagcagtctagttttaatcctacagccttattgctgtcaatcagtgattttacggttttccaagctttattttttgaatttgtttcgttcgttattagctttagtccaaggtttttgcttaaattcactgtcagcaaatcaggtttaattcgtccgccaataaaagggaaatcaagtgttttcatgttgaaaatagcaaaccctagtccttcaccaagtccaaaaatcatcggttcactgagataaatgcttagttgagtaagcagggtgcctattgttgtgctttcacaatgttgtccaataaagggctgggtgtttgttattattgtcatggctaattccttagtgttagtcgttttttcttaataggatattgaagtatggttttcagttgaactattctgatttagaaatgaggcaaagaattcctcttcccagaaaatgggaaactgatcgacgacgtttgtttaagtgatgttaatttttccaacgctagattggattcaataaggttttctaactaaattttctttttctgcttttcatactgactttttgcaaaccccattttctttaattcctgattgagccagtctttctcagcttttagcagcgtttggctaaggctgaaaagttgctgggcaacagctgtatcgttatggttacctttctgtttgttttgcatgtccttgaggtctttttcaagaatttcttttcgtttgaaaagggctgcgcacagttcattgtcattcaaaagataacttgttgcaagccccgtcattaagtgagcattagccggtctgcgttcgctgataagcttttgcgtagctgcctttagagtttcccgaccttcttgggttattcgataatcttttttctcctttcccttactgacaatactgacggttaatctttttttctctagtttatcaagagtataataaatagatgagaaaccaacatccgtccacttgcgcatgtcgcgttctttaataatttgttcaatgtgataaccatgttgcggtccctcggctaaaataccaagtatcaactgttcggtcagtgaaatagtcatagcagtctccttatattctatctctagaatatttctattctattactagaatagaaatttgtcaaattttaattatttattgcctatgtctaatgggaggattattatttttaagccatttaatttatgagccgatctccattaagaattccgatatggcaagcttaattgatgttttcctaactgtagagctattttgtcaatatacacttttaaattgaaaatggtttgtatataaacgtatcaccattgaggtagctaagaaaatcaagtttttttcgcaagaataatttttcatgctataatggcattatgagatataaagactttacagaaaataccgatattgtctatggcgttcatgctgtcatagaaagccttcaggctaatacgggccataaactctatatccaaaatgacttacgtggtaaaaatgttgataaaataaaggatctagccgcagagaagaaagttcctatctcttggacgcccaagaaaactttgtctgatatgacaaaaggagccgttcatcagggctttatcttacatgtgtcagcctttgcttatacagaatttgaaatgcttttaaaaaaagcagagcgagaagataatcctttgcttcttatcttagacgagcttaatgatcctcataattttggttcaattttgcgtacagctgatgcaaccaatgtgactggaattattattcccaaacaccgtgcggtcggtgtgacacctgttgttgctaaaacatcaacgggtgcagtggaacatatccccattgctcgtgtgaccaatcttggccaagcccttgataagttgaaagcagctggtttttggatttttgggacagatatgaatgggacaccttcaactcagtggaacacttctgggaagttagctttgattattggcaatgaaggacgaggtatttctcacaatatcaaaaagcaggttgatgaaatggtgacgattcctatgaatggacacgttcaaagtctcaatgctagtgtagcagctgctattctcatgtatgaagtttttagaaatcgaaagtaatgatctagaaaaaggagataaaaatgacttttaaaattttgaccgattcaactgctgatttgccagaaagctggacacaagaaaatgatgtccaagtgcttggtttaactgtccaattagatggtatcacttatgaaacagtaggtcccgatcggctaacaagcaaggtgttgttagaaaaaatcgctgctggcagtaaaccaacgacgagtcaagtgaatgttggacagtttgaatcttattttcgtcaatccgctgaaaatggacaagaagtgctttacatcgctttttcatctgttttatcaggaacttatcagtctgctgttatggctagagatattgttttagaagagtatccacaagcaagcattgaaattgttgatactttagcagcagctggtggagagggctacttagcaatgctggcagctcaagcccgcgaagaaggaaaatctcttaagaaaaccaaagaattgattcttgatgtaggaccacgcttgcgaactttcttcttagtggacaatctttaccacttgatgcgagggggcagactctcaaagacctcagcaatcgtaggaagtttggttaatatcaagcctctactgtggttggatgccagtgggaaattagttccccttgccaaattacgcggtcgtaaaaaaggaatgaaagaaatgcttaaacgggcaacagctgatgtggctcatgatacggctgttgtggcctatgccaatgatagtgaagctgctgaaaatttaaaagagcaattattggcaaatgaaaaaataaaaaatgtagtcacactacctttaggccctgtcatttcaacacatgtaggaccaaatactttagcagtctttaccatcggtaaagaagccagataaagagagaaatcagataagttagtttatctgattttatttttcaaaaatattttagatattttgtaaaatatatttgacaaaatgctataattgaagtatgataaagatgaaaaggaaaggaagtgtctcttatgtttgaccttgttgttaatttgattttattggttattgtgataggtggatttgtcttcttaagattctatgcggataagaaaggcaagcgagaatacgatgaacgccagttacttatgcaaaagaaagcttataccaatgcggcttgggttgttatgggtttcaatcttgttcttgtgatatggggtgaagtgttagcaaaatatatctcgctatcctttgcaggtactgccaatctctttcttatcgtaggcgtctttgtctgtagcagtatcttaaacgatgcttatttcacagcaagaaaaaacaaaaaattcctctatgtgtatgccgttattattgctattcaaattttcactgtttatcaaaattggagtcaaggcagctttggtcatgacggacatatttatctaacaggagaaaaagcaatgagtttattgtttatcttgacttttgctgtcatttttctagtaactgcttataaaacgattcaggataagagagagggaaagtgatgaaaatggaaaagtcaaataaacaagtcatttacgatgaacgtcagcagcaaattcaacttaaaagttatagtctttcattttggtttgttatgtttatactctattttgcaacttttggaaagactgatttgttgcttaatatcgctttttggggaggacttgttcttaatttttgctacagtactctaagaggtgtcggtccttttgttgatccacgttttggaaaaattgcaaaaatcggtcgtttggccgctgttcctcttatttttttgggaatgctagtctttcttgttgctatcataatgtctattctagaacatgatagtttaagagaaacgatcacaaaatgctcctacttaggcttatctggtttttggctaatttgtatgggagcaagtatcgtctaccgtcattatcttgataagaaagaagcagacaaatgaaaaatttacgtttaaaagctgcgcgtgccggtaaagatctgtctcagcaggctttagctgatttagttggggtatctcgtcaaacgattgcagctgtggaaaaaggagattacaatccgacaattaacctttgcatcaagatttgtaaagttttggacaagagtttagatgagctgttttgggaagaataaaagaggttcatcttagaacagtttcatttttatttatttattttattaaagagtgggaaaaattgctaaatttttaaagtaagtttcaccgcgcaggatagtggaggctcattggaacaaaagtgtaaaagtagtatagttcgtctcgaacgtaatttcatcataaaaatctgtctcatgctgacttctggtttggaaagtgaagcagaacttactttaataatgacaagagagaaaaatttataattatcagcctgtaagtcttgactttggggctgattttttgatattatataaggcggtattgtttgccccatttgaaaggccccggaacccttcaaataatttgtggaccggaacatccacattgtaaacataaagattcgtataggagaaatcatgaacaaaacaacatacatggctaagccaggtgaagttgaacgtaaatggtacattgttgatgcgactgatgtccctcttggacgcctatcagcagttgttgccagcgtacttcgcggtaaaaacaaaccaacattcacacctcatacagacacaggtgactttgttattgttattaatgctgaaaaggttaaattaactggtaaaaaagcagctaataaaatctactacactcactcaatgtatccaggtggattaaagcaaatctctgctggtgaattgcgttctaaaaatgctgtgcgtttgattgaaaaatctgttaaagggatgcttccgcataacactcttggacgtgcacaaggtatgaaattgaaagtctttgttggttctgagcatacacatgctgcacaacaaccagaagtacttgatattacaggacttatctaagaggaaaggagcataaatttaataatggcacaagcacaatatgcaggaactggtcgccgtaaaaacgctgtcgcacgcgttcgcttggtaccgggtactggtaaaattacagtaaacaaaaaagatgttgaagaatatattccacatgctgaccttcgccttgttatcaaccaaccttttgcagtaacatctactgaaggttcatatgatgtttttgttaacgttgttggtggtggttatgcaggtcaatcaggagcaatccgccacgggattgcacgtgcattgcttgaagttgatccagactttcgcgacgcactcaaacgcgctggtctccttacacgtgatgctcgtatggttgaacgtaaaaaaccaggtcttaagaaagctcgtaaggctagccagttctcaaaacgttaagaacagctacaatacagcatttacaacacttcatggttcacaccatggggtgttttttgattttcaaaaatcacagttaattgctactgattttataaccagcgattgattgtagaggacaaagttgattcagatagtaactatgaattggcttataagcgtagtgaacttgaaaaacttattgatagaggagatagaagatttgtacgataaaataaaatttatagctaatacccaagatttactagagaagtaaattaaaagtatatacaaaatgatacgtctgtgatataatagacacagaaataggaggtggcattatgcaactagtcatcaataaatgggggaatagctccgctattcgtttgccaaaacaattggtacaagaattacaattacaaacaaatgatgtcttagactataaggtatcagggaataaaattatcctagaaaaagtgaataatatccctgaattaactgtagaagatctgtttaaagattatcaaggtgaacctgtcaatgttaccccagctctatttgaaagtgtgggaaatgaacaatggtaaccatcaagcaagggtcaattatcaaaattaacttggatcccaaacaaggacatgaacaaaaagggtatcgtccgtacatttgtctaaaccatagtatcgtaaccaagtattctaatattgctatttttgcgccaattagcaataccaagcgtgattaccctttttatgttcccctagaaggaacagaatccacagggaaagtattattagaccaactggttacaatcgattttaatgctagagattatcgttatgtggaggatattcaggaagacttattagatgaacttttagctagggtcaaggtgctatttgaaaaaggataatgagctaaaaaaagatttcagttaaacttctactgaaatcttttttattttatttataaatgcattattaagacttgctataacactaaacagttatacctcgctttgaattatcagtcttctttagggtctgaaaagattactaattcattatcttaactttctgtctaaccttcggaagcgaaagaacagtagagtcatcctatggaatcatgtagcaatggtgttaattcattgagtatatcatttaatatatcctgaatgtcgtaaggatggcaagttgccccataaattaatctttctatattcttttgaaaatggtttggtaaatactgtgcattttgttcggcataggctattattcgtttttcgcctggatgggttagcatattaagcgcaaaaattaaatcaaagtaagtttctaaaaatgctgtaactctatgattaaagctaacaatgtctttacgcataactgctttgataatttgcttatcataagatggaagatgaccagttaacaagttcatatggtggctaaggatagtctgttttagtttttgtggatagttaatatcaaatctgttaacaatacactttagcttatcatcagaatcataaagaatttttgagtgcagaacattgtgccataaacaggtggtatatgcgttttggatgatgcacctttcaacaacatctactagttcatctcttatctggttaatatttctatagaggatatcaatatcttgaccagacattaaagtacaatcgtcttcaagttcccaaaaatgattccctatttctatgtgtgaacagaacctttttaatatggttaatcgtgtggcttcgtcaggaattgatgagcaataaatgtaaagatcatagtcagatgtttcatcataattatcggtggctcgcgagccaccaagagcaattgcttcaacttctgatatttttgaaaattctttccaaagatatgtaaattctatattattatctcctttcgtaaaggtaaacttctagttaaattgtatcatagtaagctaaattctaaaatctacacgacaaacgcatgaagaaaggactgttttttcagagaacaatttcaaaagcacaaactctcctcttaagtataatagacttaggaggtgttttgaatgacagaaatccttaattttctgattgcggtgtgtgctgatcgtgagaattggaaaatcaaacacggtttgtctgatagtgttcttttgattttctttgcccgctttacaggagccgaatactggtaagatattgaagactttggaaagcttatgagtcttctttacgtcgtgttcttaagctagaaaatggtattccatccatgatacgctgcaatgccagtgtccaaaaagcgctacatgttgtcttctgcttatgcaacagccttgggcatctgttatggttgagtgacaattgatgagaaggaaagtgaaatcacagctataccagatttattagagcacctatcagtaaaaggatacctactttgaaatttagtgaaacaaaattaaaaatcatctgaccagcatctgtcttttcaatcttcttcttaattgttataatgaagaataggttattttgctcgattatgtttacgaaaagttaagctaaggaaagtatcatatttttgttactgatggaggtaagaaaacaatgcgctggttttatgaatgtcggagtttgctatatgagagtatgcatcaggttttccctttggctcttatctactctttttcggttcttattcaaaacctttttttatctccaactagtttttttgcggtgacagtcggtttgaaattatataaaaataaatggattttttcatttacagaacactttttagagtttaatcgaattgttctgtgtttattagttggcttatgtatggcttattttatacgcttactcttaaaaagacatcaaatagattcgtttataccaagtcttattagttttttgctagtatggctgctctttggtgaagttaattttgatgtggataatcatattgctcagcctatttggctgttccaagtattgggggcactggtattttatggtgcagctttattaaataggaagttaaagcatcatcattttcaattattaaagtggctttttctgtccctttttgtctatataacacttttttggggaattactacctataagatcccatttttaaacattaattactatgttcaagaaggcttttcaaatttactgggtaatggacctagtcacctctttctcatcatatttttatcttttggtggcgtcatctttttttctctgggtttaattgtgcccgaagtgttagcgtctcctaatttttctttaaatgttgtcagtgaaaatttggatgcggttttgaatcattcaattcataaggtatctcatctgtttaccctttatactgtacaagatgcttttgctttatatggtggggtgggattgttgttagctttaggaattgccatcctgcttattagcagacggtatcacataaatacttcttataaaatggctggcctttcttttattcctttggtgtttgatcagccattgcctcttttattgagtttccccattttatttcagcctctgcttttgattccaatgttactgacgacgcttgttgcagaactgttaggagcatgctgccttgcaattggtcttatcaatccagctgtttatgaagtacctactggaacacctaactttctctttggttttttggcatctaatggtgattggcggtatttattggttacgattattattttagttatttcagtcatgatttatctgccttttgttaaaattgttttgtttagagaggttcttaatgaaaaaaatagtgaattatagtgctctcatccttgtagcgattattttactaaccatgattttttgggggaaaaattatattaatatttcttctaaaacgaagatgaaaatttacaattctcgaatgaaccccaccattatggttccgggttcagaggccactcaggaacggtttaatgagacacttgcttccttaaataagcaagggaaaaaacatagcattctcaagttaactgtccataaggataattcgatttcttatagcggacagattgctgctagtgataatcgtccctatattgtcgttgcttttgctgataataaagatagttatgcaacgattaaaaaacaagcgaaatggctggatcatgctcttgatgaattgcaaaagaaataccattttaaaaattttaatgctatcggacattctaatggcggcttggattggacagtctaccttgaaaattactatgcaaaagaaaattttcacctcaatactctgatgacaatcggaacaccttataattttgaggttgttaatagttccaatcacacccagatgctgcaagatctgattgctgctaaagatgcattgccagacgatttgaccgtttataatgtggcaggaactaatagctatgatggtgattatatcgttcctattacgagtgttgagacaggtaaatacatttttcaaaaaacaataaagcaatatacacaaattacggttacaggaaatgaagcagagcactctgatttaccaacgaataaggaagtcttagacttgatttctgaaaatattttaaataacaaccgtaaaaaggttggtccaaaaaatcaaaattaagaggaattaaaaatcttccaataacggaagattttctgctttaacaagaagattttcagagatgtgtaaacgcttgcttttaaaaagaaggaatgctatagttaatttgaatgatataacaatgagaaagaggtgacaattatgaatttagtaggaatcgttgggacgaattccgaacgttctaccaatcgcaaattgctgcgctttatggccgagcattttgctcctcaaactgctatcgaagtcttagaaatcaaagttctgcctgcctttgatgaaccagaaaacaagaaagctccagctgcagtggttgctttttctaaaaagattgcagcggcagatggtgttattattgcaacacctgaatataatcatactattcctgcccccttggcctcggctttagagtggattgcctataccagtcgagttcttgttaataagccagttatgattgtgggctgttcgctaggtgcccttggaacatcgcgtgctcaagctcacttgcgccaaatcttagatgcaccagaattgaaggcacgtgtcatgccgggaacagaatttttcctaggtcactctgaacacgttttggatgatgactttaacctcaataatcctgaaaaagtagctgagctggaggagcatttcacagaatttcaggactttgtgatcgtcacaaatcaaattgtcaaacaagctgatacagatcgtaaaaaggcatttgtatgggaagcgggtgaataaaatgaaattaattgctattgttgggaccaatgctaagcaatcctataaccgaattttactgcaattcatgaagaggcattttgttcaaaaggctgatattgacatcatggaaattgctaatgttccaatgttcaatgaaacagaggatcaaacggatttacctgctatccaaaactttaatactaaaatcagccaagctgatggggtcattattgcaacgcccgagcacaaccacaccattccatcaagtctaaacagccttttggaatggctgtcctttaaagtacatcccctagatggcaaaccccttatgattgttggggcttcttatgatgtgcaaggatcttctcgagcgcaattgcacttacggcagattttagatgctccgggtgtcaatgcggccgtcatgccgggcagtgaatttttactgggacacgctcatcaggcttttgacgaagcaggcaacctcaagtcagaagcaacggttgattttctagagtcttgcttctttaaattcttacggtttgtgcaagtggctaatcaattgaatgaaccagaagaagtaagctttgaagcagggacttatcaggtgacaacccaagggcataatggcaaattgccaatgactgtaaccttatcagaagaaaagattgaaaagattgatattgatagttccggagaatcctcaggaatagccgatattgtctttacacggatcccaaatgaaatattggaaggtcagactttgaatgtagatgctgtgtcaggagcatcggtgaccagtaatggtgttctggacggggttgccagagcaattaagctggcaggaggcaatccggatgttttgcggaaacgtccaaaggcaccatcagccttggataaagaagataagacttacagcacagatgtggttatcgtaggtggaggtggagctggtttagcagccgctgctcgagtgctgcaagcaggtaagcaagtgatggtgcttgaaaagttccctgctcttggaggtaatactgtacgttctggtggcttattaaatgcagcagaccctgaatggcaaaagacttttcccgctaatcccggggaggctcataatctttccgagctgattcaaacagatgaagacagtattgcagcagaatatttagccgactttaaggaattaaagcagcaagtaactaattacttgaaagatccaagctatttatttgattctaatattctccatcggattcaaacctatattggtggtaaaagaactgatcgtaatggttgtgaagtctatggcaattatgatcttgtaaaggtgttaacagataaggatcttgattccgtccattggttagcggatattggtgttgattttgatcgctctgaagttagtatgccagtaggagctttatggcgtcgctctcacaaacctaaacaaccgatgggttatgcttttattgaagctttggatacctatattcgcaagaatagtggtactattttaacggatactgcagtcacagattttattttagaaaatggtcttattaaaggagtacttgctaaaggccgcaatggacaaaccattaccgtccatgcccaagctgttgtcttggcttctggtggttttggtgccaatactaagatgttacaacaatataatacttattggagtaatattgatgataacattcaaacaacgaattcaccagctataacaggtgatggcattcgcttagggcaaagtattggtgccgctcttgttggtatgggctttagccaaatgatgccagtgtcagacccgaatacgggagccattttctcaggcttacaagttccgccggcaaactttgttatggttaatcaagaaggcaaacgttttgtggatgaatatggtagccgtgatacgctttctaaagctgcgattgataatggtggtctcttctatctaattgctgatgaaaatatcaaagcaactgccatgaataccagcaatgaaaaaattgaagaacaagttgcagcaggaacgctttatcgtgctgatactttagaaagtttggcagagcaaattggtgtggatcccgctacccttgtggaaaccatcaacaattacaattcctatgttgaagcgggctatgatcctgagtttgataaaggagcttttgatctcaaggttgaaaaggcgccattttatgcaacacctcgaaaaccagcaacccatcatacgatgggcggtttgaagattgatacacaagctcatgttattaaagaagatggcaataagattccatctctttacgctgctggggaagtgacaggcggcattcacgcaggcaatcgcttaggcggtaatgctttagctgatatctttacttttggacgtattgcagcagaaacagctgtaacagaatgctgctaataagtgatattcaataaaaaaacttaaagattcctttttggtaaattctcctcaaataatgagtgacatcaaatcgtctctcttataagaggagttttttgatcatttaagcatcagatatgtttttatttttgtaataaatgcctactctaatcataaaaatatttacattgggcaggttcgcaaaaagtgatataataagagtatgattgattctcaattaaaggaaaaaagaaaagtcattattgaaaagaagattgctttgggcaaagcttctgggaaaattattttaatgggggagcatgctgtcgtttatggacagccagccattgctatccctttttctgctgttgagactgtggcagaagttaaagaagacggcgaagccttaacagttacctgcgaattttatgacggtcttgttcataagatgcctgaaattttggaaagtctcaagcatgccattcgtttttccctttatcgtattggagcaccgcaagatccagccattcatattgatattcactctaccattcctgctgaacgtggaatggggtcaagtgcagcggtggctgtagctattgctagaagtctttttaacttttatggtaaggtattgacggataaggaattatgggaaattgttcaatcatcagaaaagattgcacacggtaatccttctgggattgataccgtaacgactagtggcaaatctccagttttttttgttaaagatcagcccattgaacagttgtcaatcaatatggatgcctatttgattgttgctgataccggtcagactgggcagaccttaaaagctattcaatcggtaaaagcacttcttagcaaagtaacttatcaaattgatagcctttcagatcctaagcaagccattaaggaattaggtcaattgacaaaattggcaaaggaagctctattaaataattacattttagaattaggcgaagtgatgaatcaggcccaccaacttttagcaagtctaacggtttccaatcaaactttggatagactggctcaagctgctagacaagcaggagctttaggagctaaattaacaggtggtggccgaggtggatgcctcattgctcttgcgaaagataaagaaagtgcagaaaagattgcaagaaccttattagaacaaggtgctaagcaagcatggtgccaatatttaggaaatctctaatattaactgaaaaagttgaaaatctatttaaactatactaatcggtgaatcgcactgtcgaagttagatgtccgacctaactttgacagtgctttttatatttaaagaaaggaaatgtaattagtaaaaagtagcaaacctcgaaattaattacatctaatacaaaaattaacttgacttaatttttgtattaggctatattacttataaaaggagtaaaaatgttaaagatagaaaatttaagcgtttcttatcgtgatcatcttgctttagagaatgtttccttggaaatccctagttcaacaattacaggtattattggccccaatggtgcgggcaagtcaaccttatttaaaggggttcttaatatggttgatcatgaagggacaagttttattgatggcaaaatcttaaatcaaaatctaagaagtatttcctatgttgaacaaaaagcggatattgattacaattttcccattaaagtcaaggaatgcgtttctttaggtttattttcaaaagtcaaacctttttcaaatttgaaaaaacaagattggcaatgtgttcaagaagcactttctcaggttgatttggcagactatgccaataggcagattagtcaactttcaggggggcaatttcaacgtatgctcttggctcgttgtttggtacaagatgctgattatatttttttagatgaaccttttgtaggaattgatattatcagtgaggaactgattgtaggactgttacaaaagctcaagaaagaaggaaagaccattttaatcattcatcatgacttgagtaaggtcaaaacttactttgatcacgttctgcttttgaacaaaaaagtccttgccttcggtcagacagaaactgtttttacacagaaaaatctgactaaaacctatcaatcacaatttttaatggcaggtgatgcttcatgattacagaatttatacaaggcttatatcagtttcattttttacaaaatgccttggttacggcgattgttattggtatcgtagcaggagctgtaggctgttttatcattcttcgtggaatgtcccttatgggggatgccatttctcatgctgttttgccgggcgttgccttatcttatattttgggaattaatttttttattggagctattgtttttggtcttttggcttcgctcattatcacctttattaaggaaaacagcatcattaaaagcgatacagctatagggataacctttagttctttcttggcgctgggtgtcattttgattggtcttgccaatagttcaactgatttatttcatattttgtttggtaatatcttggctgttcaggatatggataagtggattactttgggcatttctttgcttgttcttctttttatctgtttatttttcagaccgcttttattgacctcttttgatcctgttttggctaagtctatggggctgtctgttcatttttaccattatctgttgatgattctattgactctggtttctgttacagctatgcagagtgttggtacgattttaattgttgccttgctcattactccagcagcgacagcttacctttatgccaatagcttaaaaaccatgattttattatcgtcaactttaggtgcctttgcttccgttgccgggctctttatcggctatagttttaatattgcagcgggttcaagcattgtcttaacctcagcacttatctttttgatttcttttgtttttgcacccaagcaaagattttttaagaaaaaagcaaaaaaataatcattcttaactatgatcaattatttattataaaaggagaattctaatgaagaaattaagcttattattactagtttgtttatctttattaggcttatttgcctgtacttctaaaaaaacagccgacaaaaaattgactgttgtggctaccaattctattattgctgatattactaagaatatcgctggtaataaggttgtcttacatagtatcgttcctgttggtcgagatcctcacgaatatgagcctcttcctgaagatgttaaaaagacctctcaggctgatgtcattttttataatgggattaatcttgaaaatggaggcaatgcttggtttaccaaactagttaaaaatgctcataaaaagacagacaaggattattttgcagtgagcgatagtgttaagaccatttatttggaaaatgcaaaagaaaaaggaaaggaagatcctcatgcttggcttgaccttaaaaatggtattatttatgctaaaaatatcatgaaacgtctatctgaaaaagatcctaaaaacaagagttattatcagaaaaattttcaagcctacagcgccaaacttgaaaaactacacaaagtagccaaagaaaaaatcagtcgtatccctactgagaagaaaatgatcgtaactagtgaaggttgtttcaagtatttctctaaggcttacgatattccttctgcctatatatgggaaattaataccgaagaagagggaacaccaaatcaaattaaggctttagtgaaaaaattaaggaaaagtcgggtgtctgcgctttttgtagaaagcagtgttgatgatcgtccaatgaaaactgtttcaaaagatacaggtatcccaattgccgctaaaatttttacagattcagttgctaaaaaaggacaggctggagatagttactatgcgatgatgaagtggaatatagataaaattgcaaatggtctgtcacaatgaggaaaggtttccgcttactcccagctgtttagcatatgaagctgttaataataaatatcatcacccaattaatatggaaacagtctattcaaattttcctgataggatgatggataattaaaacttttatccactttttactgacattttgatataatgattttgacaaagaagaggataaactatgacacctaataaagaagattaccttaaaattatttatgaactcagtgaacgtgatgagaagatcagcaacaagcaaattgctgagaaaatgtctgtatctgctccggctgtctcagaaatggttaaaaaattactattggaggatctggttcttaaagacaaacaagcgggttatttgttgacaaaaaaaggacagattctagcgtcatctctttatcgcaagcatcgtctgatagaagtttttttgatgaatcatcttaattacacagcagacgaaattcatgaagaggctgaagtgctggaacatactgtctctgatgtgtttgttgaacgtttagataagtttcttaactatcctaaggtttgtccgcatggagggaccattcctcaacatggacagcccttagtagagaggtatcgtacaactttaaagggtgtaactgagatgggagtatatttgttgaaacgtgttcaagataactttcagttattaaagtatatggaacagcatcatttaaagatcggagatgaattaaggctcctagaatatgatgcttttgcgggtgcttataccattgaaaaagatggggaacaattacaggtgacatcagcagttgccagtcaaatatacattgaaaagaaagcttactaagaagagactatccatgagacatcatgatatgagttagctttctgggttgaattatgtctagactataagaaagaattttcgctgctttttgaaattttcgcataaataaagcttccatgcatgcttgaaagctttatttatgcgaaagatgtttattaagggattgagtatcaatggatttgagcgaaaatgttctcgacttccaaaatggtttcagctcgtgagacagctgagcgaattttggcagcacctgatgtaccgcgaaggtaataaggtgctaggccacgaaattcacgaacagcgattttttctcccttaagatctaccaaacgtcgaagatgatcttgggcaatttctaacattttagcgaatggcagattatctaaaatttctcctgtttcaaaataatgattgatttgagtgaaaatataaggattgcttctggcggctcgaccaatcatcacagcatctgcgccaacttggtcaatcataaattgagcgtcctcaacgctacgaatatccccattggcaataaaaggaacttttgtaatggctttagcgactttagcgagggtttcatggtcgcatgagccagtatacatttgctctcgggtacgaccgtgcatggcaagagcagcaacaccagctgattctgcagccaaggcattttcaacagctagggaggcatcagaccagccagtacgcatttttacggttaaaggaatgttcaaaacagacttaacacttgaaatgacggagtagattttttcaggatctttgagccacatcgcaccagcttcattttttacaattttattaactgggcagcccatattgatatccacaaggtcagtctttgtattagcttgaataaattcagctgcgcgtgctagactatcaccatcactgccaaaaagctgaatagaaacaggatgttctccttcatcaatatgaagcatgtggagcgttttttcattattgtattggatgcctttatcggataccatttccatcacgacaagtccagctccaaattctttagcgatagttcgaaaagcggaattcgtcactcctgccattggtgctaagacggtgcgatgaggaatttccacattgtcaatcataaatgagctattaagctttgtcattaatcatctcctctaaatcactttccttaaattggtattttttaccacaaaattggcagacaatttctgctccgtggtcttcttctttcatttctttaagatcagatttgctcagtgtcataagagctgcttcaaaacgctgacgtgagcaatcacaggtaaactgtaagtcttcctcgactaaaactttatagtcctcttcaccatagatagctttcaagagagcttcgatgtgatcctctgactctagcagagttgaaatagcaggcatttcctgaatgcgtttttcataacgagtaatttcttcctcagaagcctctggaaggacttgtagcataaagccaccggctactttgaccttatccttttcatctaagagcacattgagcccaacagcagatggtgtttgttcactttcagttagatagtaagccaaatcttcaccgatttcacctgaaacaagtggcgttgatgaagtataagggttgccagttccatagtcagtgatgaccacaaactgtccatttcccataaaaggtcctacgataacttcaccgctagctgtttttttgacatcaacgccggcattttgaatgtagccttttacatttcctttggtatcagcaaccgaaataatatgaccaaaagaagagtcaccgataactttgacagtaaccttgctgtctcccttttgattagctgctagaatttgattggcaatgagtgtacgtcctagagcgacagttgaacttgagagggattgatgttcttcttgagcagttctgaccgtttcagtgctatcgagtacataagcacggaaagatcccgattttgctattgacttaataagtttatccatatccattattctaacataaattatcaaagaagtaataataaggaaacttggtaaatacattctttagttattgtcaaaaagtgtttcactcaatttcaatgaatgttagttaactaaaagacttgttactaatatcaaaatttttcttaatactttaagtttaaggtataaatatgaaaagccaagaggttcatcagtgtattttcggaggcagtgctagagtgttgcgaaaggggactaaaaaggcgtggtttaggggaagagaggtatataaaggaaataaaacagaaaaaaagcgagaaaagctattgacaaaggggggaagagctggtagaataaagaagttgtctcagaaagaggcagagccctttgaaaactgaacaagaagacgaaccaaccaaagtgcagggtgacataaagaaatgtgacctgtcaaagaacgaaaaaaaactgtcagagtgcagaaatgagtgaagactcaagcttttaatgagagtttgatcctggctcaggacgaacgctggcggcgtgcctaatacatgcaagtgggacgcaagggaacacactgtgcttgcacaccgtgttttcttgagtcgcgaacgggtgagtaacgcgtaggtaacctgcctattagcgggggataactattggaaacgatagctaataccgcataatattaattattgcatgataattgattgaaagatgcaagcgcatcactagtagatggacctgcgttgtattagctagttggtaaggtaagagcttaccaaggcgacgatacatagccgacctgagagggtgatcggccacactgggactgagacacggcccagactcctacgggaggcagcagtagggaatcttcggcaatggacgaaagtctgaccgagcaacgccgcgtgagtgaagaaggttttcggatcgtaaagctctgttgtaagtcaagaacgtgtgtgagagtggaaagttcacacagtgacggtagcttaccagaaagggacggctaactacgtgccagcagccgcggtaatacgtaggtcccgagcgttgtccggatttattgggcgtaaagggagcgcaggcggtcaggaaagtctggagtaaaaggctatggctcaaccatagtgtgctctggaaactgtctgacttgagtgcagaaggggagagtggaattccatgtgtagcggtgaaatgcgtagatatatggaggaacaccagtggcgaaagcggctctctggtctgtcactgacgctgaggctcgaaagcgtgggtagcgaacaggattagataccctggtagtccacgccgtaaacgatgagtgctaggtgttaggccctttccggggcttagtgccggagctaacgcaataagcactccgcctggggagtacgaccgcaaggttgaaactcaaaggaattgacgggggcccgcacaagcggtggagcatgtggtttaattcgaagcaacgcgaagaaccttaccaggtcttgacatcccgatgctattcttagagataggaagttacttcggtacatcggagacaggtggtgcatggttgtcgtcagctcgtgtcgtgagatgttgggttaagtcccgcaacgagcgcaacccttattgttagttgccatcattaagttgggcactctagcgagactgccggtaataaaccggaggaaggtggggatgacgtcaaatcatcatgccccttatgacctgggctacacacgtgctacaatggtcggtacaacgagttgcgagccggtgacggcaagctaatctctgaaagccgatctcagttcggattggaggctgcaactcgcctccatgaagtcggaatcgctagtaatcgcggatcagcacgccgcggtgaatacgttcccgggccttgtacacaccgcccgtcacaccacgagagtttgtaacacccgaagtcggtgaggtaaccttttaggggccagccgcctaaggtgggatggatgattggggtgaagtcgtaacaaggtagccgtatcggaaggtgcggctggatcacctcctttctaaggaaaaacgcaaagcacattaggggaacttcttgtttagttttgagagggtaagtggggccttagctcagctgggagagcgcctgctttgcacgcaggaggtcagcggttcgatcccgctaggctccattaaaacaggatactaacagacggttcgcttgcgaatacttctgtagaagattatctaattttctacagaagtcagtctggagttcaacttcatatcttgtttaagacaaggaagtctataaaatccacttaggatatgttaagtatcctagagatggttcattgacaattgaatagctagtaaaagccctatagcgcagctatagggaaacaaaaaagaaaccgagacgctgaaaagccagagaaacgagaaataaggttaagttaataagggcgcacggtggatgcctaggcactaggagccgatgaaggacgtgacgaacgacgacatgctttggggagctgtaagtaagccttgatccagagatatccgaatgggggaacccaacaggtaatgcctgttatccataactgttaaggttatgagaaggaagacgcagtgaactgaaacatctcagtagctgcaggaagagaaagcaagagcgattgcctcagtagcggcgagcgaagaggcaggagggcaaaccagagtgtttacactctggggttgtaggactgcgataaagcagccaagggaatagaagaagactctgggaagagtcgccagagagagtaagagcctcgtatttgaaattcacttgatgccaagcaggatcctgagtacggcgggacacgaggaatcccgtcggaatctgggaggcccatctcccaaccctaaatactccctagtgaccgatagtgaaccagtaccgtgagggaaaggtgaaaagcaccccggaaggggagtgaaagagaacctgaaaccgtgtgcttacaagaagttcgagcccgttaatgggtgagagcgtgccttttgtagaatgaaccggcgagttacgtttacgtgcgaggttaagttgaagagacggagccgtagggaaaccgagtctgaaaagggcggttaagtacgtagatgtagacccgaaaccaagtgacctacccatgagcaggttgaaggtgcggtaaaacgcactggaggaccgaaccaggacacgttgaaaagtgtttggatgacttgtgggtagcggagaaattccaaacgaacttggagatagctggttctctccgaaatagctttagggctagcgtcggtcgcgagactcttggaggtagagcactgtttgattgaggggtccatcccggattaccaatctcagataaactccgaatgccaacgagttaagaccggcagtcagactgcgagtgctaagatccgtagtcgaaagggaaacagcccagaccaccagctaaggtccccaaataattgttaagtggaaaaggatgtggggttgcacagacaactaggatgttagcttagaagcagctattcattcaaagagtgcgtaatagctcactagtcgagtgaccctgcgccgaaaatgtaccggggctgaaacaatttaccgaagctgtggatcccttaggggatggtaggagagcgttctatgtgcgcagaaggtgtaccgcaaggagcgctggagtgcatagaagtgagaatgccggtatgagtagcgtaagacaggtgagaatcctgtccaccgtaagactaaggattccaggggaaggctcgtccgccctgggttagtcgggacctaaggagagaccgataggtgtatccgatgggcaacaggttgatattcctgtactagagtattgagtgaaggagggacgcagcaggctaactagagcgtgcgattggaagagcacgtccaagcagtgaggtgaggactgagtcaaatgcttagttctgcgccaccaagctgtgacggggagcgaagtttagtagcgaagctagtgatgtcactctgccaagaaaagcttctagcgttaatgaatactctacccgtaccgcaaaccgacacaggtagtcgaggcgagtagcctcaggtgagcgagcgaactctcgttaaggaactcggcaaaatggccccgtaacttcgggagaaggggcgctggcgataagtcagccgcagtgaaaaggcccaagcaactgtttatcaaaaacacagctctctgcgaaatcgcaagatgaagtatagggggtgacgcctgcccggtgctggaaggttaagaggagcgcttagacgtttgtcgaaggtgtgaattgaagccccagtaaacggcggccgtaactataacggtcctaaggtagcgaaattccttgtcgggtaagttccgacccgcacgaaaggcgtaatgatttgggcactgtctcaacgagagactcggtgaaattttagtacctgtgaagatgcaggttacccgcgacaggacggaaagaccccatggagctttactgcagtttgatattgcgtatctgttacacatgtacaggataggtaggagccaaggaagagtgaacgctagtttacttggaggcgatgttgggatactacccttgtgtgatggctactctaacccggtaggttgatcatctacggagacagtgtctgacgggcagtttgactggggcggtcgcctcctaaagcgtaacggaggcgcccaaaggttccctcagactggttggaaatcagtcgcagagtgtaaaggtataagggagcttgactgcgagacagacaagtcgagcagggacgaaagtcgggcttagtgatccggtggtaccgtatggaagggccatcgctcaacggataaaagctaccctggggataacaggcttatctcccccaagagttcacatcgacggggaggtttggcacctcgatgtcggctcgtcgcatcctggggctgtagtcggtcccaagggttgggctgttcgcccattaaagcggcacgcgagctgggttcagaacgtcgtgagacagttcggtccctatccgtcgcgggcgaaggaaatttgagaggatctgctcctagtacgagaggaccagagtggacttaccgctggtgtaccagttgttctgccaagagcatcgctgggtagctaagtagggaggggataaacgctgaaagcatctaagtgtgaagcccccctcaagatgagatttcccataacgttcagttagtaagagccctgagagaagaacaggtagataggttgggagtggaagcgttgtgagacgtgaagcggaccaatactaatcgctcgaggacttatccaaaaataagtgactaagggcgtaaaatccgcctgaaaaataggaaatgggtgcagtgtttgatgaacaccagaccatttctcttttttccaaggatttagcccgagtaccattttttaaagaaagcaggcgcagcgtcggtttcagtggctagctattcaatcgtgagtgagcgatcacgcttgttaagtgatgatagcctaggggagacacctgtacccatgccgaacacagcagttaagccctagcacgcctgaagtagttgggggttgccccctgtgagatagggtcgtcgcttagcaaaattccggcatagctcagttggtagtagcgcatgactgttaatcatgatgtcgtaggttcgagtcctactgccggagtttatatattcataaataatggagcatctttacctaggtgcttttttagttttgtcaattgtattgagttgaatcgagtggcatacaaagagaatgggctaatggtttctccttaaactattagaatgattgtttaatagtgcagacggttttgagatttgttatatttaataagttaatgtatcgtccaaattggttaagtacatggaggtaaaaatatgattgtatgcgcggcgattagtttttgtttcttgtgaactttgatttgttgatattgttctcgaattgggcgtgttcgacataccctgctttatcttgaattttgatcctcttaattttcaatctgtgaattgaatgtttcagggaatttgtccaatttcaaataatgagaaccgtgtggatctacttatcaaaattttttgcgtaaaataaaggatctgcttaagtgttttattagtttgtaatgcgaggtgatgttttgtttcaaaagaaactgtttaataaggtttcgctttaatataaagacaagcaataaagtctatttttgttagtcagaggttgtaaataaaatagccagttaagatgggacatttatgtcctgttcttaaagtctttttcgttttataataattttattataaaaggaggtcatcgtaatagatggaagaagattttgaaattgtttttaataaggttaagccaattgtatggaaattaagccgttattactttattaaaatgtggactcgtgaagattggcaacaagagggaatgttgattttgcaccaattattaagggaacatccagaattagaagaggatgatacaaaattgtatatctattttaagacacgtttttctaattacattaaagatgttttgcgtcagcaagaaagtcagaaacgtcgttttaatagaatgtcttatgaagaagtcggtgagattgaacactgtttgtcaagtggcggtatgcaattggatgaatatattttatttcgtgatagtttgcttgcatataaacaaggtctgagtactgaaaagcaagagctgtttgagcgcttggtagcaggagagcactttttgggaaggcaaagtatgctgaaagatttacgtaaaaaattaagtgattttaaggaaaaatagttaaaaagggaaagaatggaacatgtgattgtaccattctttttggttgaaaattaagaaaagttattataaattattggtttaacatgccatattatcaaactttttgatataatgtgtttaacagttttcagggaaggcatattatggaaattattgaaaaagctccggctaaaatcaatcttggtcttgatattgctggaaaatatcaagatggttttcacgaattgtcaatgattatggccagtgttgatttaaatgattatttgactattacagaaattgctgaggataagatagttgtaaaatcaaataattgcaaattacctttaaaccgaaaaaatgatgtttataaagctgctcatcttctaaagaggagataccatatctcaacggggctcaaaatatctcttcaaaaaaagatacctatatgtgctggtttaggcggcgggtccagtgatgctgctgcaactttacgtgctctcaattgtttgtggaaactcaatttatcaccaaaagaactaattgatgttggttttgaaattggaagtgatgttccttattgcattgaagcaggctgtgctttaatttcaggtaaaggtgaaattgtagaacctttagcgactactttgtcaacttgggtggttttggtcaaacctgattttggaatttcaacgaaaacaatctttaaagaaattgatatggcaacaatttctcgagttgatattcctgctctaaaagaggcacttttagcaaattcttatgaggatgccttacaatttatggggaattctcttgaagatattactattgctaaaaaaccttttattcaaaaaataaaaggccgtatgataaaatgtggtgcggatattgctttgatgacgggaagtggaccaaccgtttttgctctctgtcgaacggaaaaacgagcggatcgtgttgttaatagcatgaaaggtttttgtaaggaagtttataaagttagaatgttatagaatttgatatcatttattaaagcttactgttgtgaaaactttgaaatcttaccttatcgttgctttaaaattttttcgaatgaacgccatgatctgcggttttttcaaaatgaattttttcacttccctgtttttaaggtaagggtaaaaaattattcactgtttgaagtaggcagttcattccacaaagttacttagaatgtggttaattttggcaaccttattcttatctcaaatggtctgggagattttttaaactattattttcctaaacaagaatagcgactggaaagtttactgtaatatttaatgcagaagtatctaggaacttatgcaggagtaagattagcataatggcttatatctcttatccttcaaacactgtattttgaatcatctgatttaaaaagagaccaaggtagttgcaatcaagcttttattcgcactgctgctaaggcgactatctaaataatagaacgttcaaaaagaaatgaactggttggaattaaaagaagttctgtttatgaacatgattaaccgtatgagtagagtcaattttaattgattcttttttttttttatgttaagattagaggatgaataattaactggttaattaaaaggagggatatttatgactttaggacagcaaattgatgctttaatcaaccagattatcttaaaagctgaaaatcatcatgaactgttaattggctcctgtcaaagtgatgttaaattgactaatactcaagagcatattctcatgttattatcacaggaaaaaagtctaactaattctgatttagctaaagagttaaatattagtcaagctgctgtgacaaaagccgtgaaatctcttgttgggcaagaaatgttagaattaataaaggatggaacagatgctagggttacttattttcgtctaacgaaattggcggaaccagttgccaaagagcatgaacatcatcatgttgcaactttatctgtttatgatcgtatatcacaaaaattttctcagaaggaaaagtctgtgattagtcgctttttaacggctttaactaaggaattagaagaggaataattgtgagatacattactgttgaaaatctgtcttatcagtatgatgcagaacctgttttggaaggagttaactatcatttagatagtggcgaatttgtaactttgactggggaaaacggagctgcaaagtcaactttgattaaagcaactttgggcattcttaagcctaaaattggctctgttattttttctaaaaaaaatgtatccggaaaaccattacgtttagcttatttgccccagcaaattgccagttttaacgcaggttttcctagtacggtctatgaatttgtgaaatcaggacgttatccaagaaatggttggtttagaaggctgacaaagcatgatgatgagcatataaaagttagtctagagtcggttagtatgtgggaaaattgccaaaaacctatcggaagtctttctggcggacaaaaacagcgtgcggttattgctagaatgtttgctagtgaccctgatatttttgtcttggatgagccgacaacgggaatggatacaggaacaacagaaaccttttataaactcatgcatcatagtgctcatgagcatgataaagcggttttgatgattacacatgatccagaagaggttaaagcatacgcagaccgtaatatccatttagtcagaaatcaaaatctcccatggcgttgttttaatgttcatgaaaaagacagagaggaagaaaataatgttaaatagcattttagcttatgactttatgcaacgtgctttattggctgttgttgcaatcagtttttttgcaccaattttaggattatttttgattttacgtcgtcagagtttaatgagtgataccttgagtcatgtctctttagcaggtgttgcttttggtgtagtattaggaatttctcccacttggacaactcttatagtcgtcacgttagcagctgttatacttgaatatttacggactgtttatcgtcattatatggaaattgcgactgctattttgatgtcactaggactagctatatctttaattgttatgagcaaagctaggaatactagcaatgtcagtcttgaacaatatctttttggttctattatcaccatcagtcctgaacaagttattgccttatttataattgcgattattgttcttattttgacaatttgttttatcagaccaatgtatattttgacttttgatgaagatactgcttttgtggatggtttgccagttcgtttaatgtctgttttattcaatattgtgacaggaattgctatttcccttacaattccggcagcaggagctcttttagtatcaactattatggttttgccagcaagtattgcgatgagattgggaaaaagtttcaaaacagttattgttttagggattctaattggttttattggcatggtttctggaattattatttcttatttggcagaaacacctgccagtgctacaattactttgatttttattacaattttcgtttttattggattgatggatcgattggtgaaagattgattggaaaaataaaaaagctgaggctggggaaaagacagtttctagtcgaaattaagtaactagtaacaaaagaaaaagcttaaaatcaaggttttttgtaacttagttttaagcctttttactatttttggattttttcaagcttactcttacttttaataagttaagacaaaatattttttcttaccacgacgaataactgtgagttcattgtcaattttatcttgttgagataagttataagttaaatcttggatacgttccccattaatataaatagccccgttttgaagatcttcacgcgcctgacgtttagaattcacgatgccagccgtcactaataattcaacgatattgtgattgtcattggacttaacagcataatttggaacgttactaagtccttgtttaagttcttttgcagagaggctcttgatatgacctgcaaaaagttgttcggtaattttgacagcttcttgataggctgtttgcccgtgaacaaaagttacaacttcttttgccaatattttttgagctaaacgttcgtgaggtgctgcttcaaatttgactcggatgtcttcgatttcatctagagataggaaagtaaaaatcttgaggaagcgaatggcatcagcatccatgacattaagccaaaattgatacatttcgtaaggagatgttttatcagcatcaagccagacagcatttccttcagacttaccaaattttttaccagttgcatctgtgattaatgggacagtaatgacatgggctgttttattagcttttcgacgaattaattcagttcctgcagtcatatttccccattggtcagaccctccgacttgaagtgtaacagcatgttcttgattaaggacgtaaaaatcatacccctgcataatctggtaagcgaactcggtgtatgaaatacctgtttcaatccgttttttgacagattctttactcatcatgtaattaacagtaaagtatttaccgacatcacgaagaaagtcaataaaagttatctttcccatccagtcatagttattgaccatctgagccttgttatcaccgtgtttaaaatcaatgaaacgttctaattgactacgaatgctttgtacccaatttttcactgtttctttagtctgtagactgcgttcatcatctttaaaagagggatcgccgatgaggcctgttgcaccgcccacaagagcataaggtttatgtccagccaattgtaaatgcctcataacaaggataggtacgagatgccccaaatggaggctatctgctgttggatcataacctgtgtaaaaagaaacttgtccgtcatctaatgattttttaagggcttcttcatcagtggtttgaaagactaagccacgcgctttgagttcttcaaaaatagtcatagagttctccatattcttataacattacaggacattatatcaaaaacactggtagctatgcaagctcttagaggaaggttaagaagtttattatcttattacgagaagaaaagaaacaatatactaaaaaattataaatttgatataatgtaaactgaggtattgttatgtccctgctaaataagataaaaactaaatttaaaagaaatattaaaaaaccacattttaaaaagattgatgtaacaaaatttaatcttaaaattttaaaacgagcagattatctggacgttgcttctgtttttttacgaacttttaagttactatctgattttgcttatattcttatccttttgattgcttttatgggaatcggtatgggttttggctatttggcaagccaagttgagagtgttaaaattccaagtaaggttaatctggtcaatcaagttagtacttttactaggatttctaaaatgacttactcagataagtctattatttcaacaattgataccgatctgttaagaacacctattgagagccgaaatatttcagataatgtaaaaaaagctgtcattgcaacagaagatgaaaattttaaaacacataagggtgtagtgcctaaggcggtttttcgagccactattgcttctgttttgggtttaggtgagaatagcggcggttctactttgacacagcaattactgaaacagcaagttttgggagacgatccaacttttaagcgtaaaaccaaggaaattatttatgctcttgcccttgaacgttatattggtaaggacagtatcttaaccaactatcttaatgtatctccttttgggcgaaataacagggggcaaaatattgctggtattgaagaagctgctaaagggatttttggtgttgctgctaaagatttgacaatcccccaagcagcctttttagcgggattgccacagagtccaattacatattcaccttatacagcagatggtaagtttaaaactaagaaggatatggaatatggtttaaaacgctctcaaaatgttctttacaatatgtatcgtacgggcgttctttctaaggtagactatgagagttataaaaaatacgatcttagaaaagattttaagagacctcaagcatcccaaacagattctcatgattacttatactattctgtttttgaagaagcacagaaaattatgtatgattatttaatcaaacgagaccatgtttcttcgcaggatttgaaaaatgataaaaccaaggcagcttacaaggaaaaagctctacgtgagatacgtttaggtggctatacgattgctacaacgattaataagatggtttataatgctatgcagatggcagtagctcagcatggtgcttctcttgatgatggaacgggaaatgttgaagttggtaatgttcttatggataattcgacaggagctattcttggttttgtcggtggccgtgattataagagtaatcagaataatcacgcctttgatactgccagatctcctggttccagtattaagcctttattagcttacggtcctgctattgatcaaggcttaatgggaagttcaagtatgctttccaattatccaacaaccttttctagtggtcaaaagattatgcacgctggcgatgaaggtacggccatggtaaatctgcaagaagcgctggatgtttcttggaatatcccagcttattggacctatcagatgttgttgcaaaaaggtgttgatgttccggactatatggaaaaaatgggctataatatccctgaatactctattgagagcctgcccttgggtggcggtgttgagacaacagtagctcaacagaccaatggttatcaaacgattgctaatggtggtgtttatcaaaagcagtacatgattgataaaattacagatagcaaagggaaagtcatttatcagcatgagtctaaaccagttcgtgtctattcgcaagccactgccagcattttgaatgatttgcttaaaggaccaattagttcaggtaaaacaacgactttcaaggataaattgaagggcctcaattcagatcttgcaggagctgaatggactggaaagacaggaacaacagatgactatacagatgtttggttaatcttgtctactcctaaaacaacacttggtggttgggctggccatgataacaatgtttcgttagacaagatgtcaggttataataacaatgcccagtatatggcatatctagttaatgccattaatcaggcggatccaaatattttaggaacaaatcagcgttttagcctagatccgagtgttatcaaagcagatgtcttaaaatcaaccggtctcaaaccagctactgttaatgtcaatggtaagaatatttctcttagtggtgagacgacaaccagctattgggcgaaaaacggtcccggagataccgtctataagtttgctataggcggttcagatagtgattatcaaaaagcttgggccagcattggaggtaagtagaaatattgacaaatcagtcaatataatgtataatttattattatttgtcgtttgctttggttgaaatattgtccaaacaaagctcacagcagttaaatcaagctttaatgaagtccgatttagctgctctttttatgcttaattttagaaaaaaagacaaatgtaatctatatttaaagattctaaaaattatacataaaagacaaattgctaatgtaccgatctgcttggcagatctagaaagaagaaggagataaaacttggcaggacatgaagttcagtacgggaaacatcgtacgcgtcgtagtttttcaagaatcaaagaggttcttgatttaccaaatttgattgaaatccaaacggactcttttaaagatttcttggatacaggtctgaaggaagtttttgaagatgtgcttccaatttccaatttcacagacactatggaattagagtttgtgggttatgagttgaaagagcctaagtatacattggaagaagcacgtgctcatgatgcacattattctgcccccatctttgttactttccgtctcatcaataaagaaactggtgaaattaagacacaagaagtattttttggtgattttcccttgatgactgaaatgggtacttttattattaatggtgctgaacgtattatcgtttctcagttggtacgttcaccaggtgtttattttaatgataaagtggataaaaatgggaaaattggctatggttcaactgttatccctaaccgcggtgcttggcttgagcttgaaacggactctaaggatattgcttatactcgtattgatcgtactcgtaaaattccttttacgacgctggttcgtgcactcggtttttccggggatgatgagattattgatatttttggtgatagcgaattggttcgtaataccattgaaaaagatatccataaaaatcctaatgactctcgtacagatgaagctctcaaggaaatttatgaacgtcttcgtccgggtgaacctaagacggcagattcttcacgtagtcttctgattgcacgtttctttgatgcgcgccgttatgatttagcagctgttggccgctataagattaataaaaagttaaatgtcaaaacgcgtcttttgaatcaagtcattgctgaaaacttaatagatcctgaaacaggcgaaattcttgttgaagctgggactgaaatgacacgcagtgtaattgattcgattgcagattatcttgatggagatctcaataaaattgtttatacgccaaatgaatacgctgttttgacagaacctgttgttcttcaaaaattcaaagttatggctccaaatgatccagaccgcacggttactgttattggtaatgccagtccagatgacaaagtacgtcacttgacaccagccgatattttagctgaaatgtcttatttccttaacttggctgagggtctaggtaaagttgatgatattgaccatttaggcaaccgacgtattcgtgctgttggtgaattgctagctaatcaatttcgtattggtttggcacgtatggaacgcaatgttcgtgaacgtatgtccgttcaagataatgaagtcttaacaccacaacagattattaacattcgccctgtaacagcggcaattaaagagttctttggttcttctcaattgtcacagttcatggaccaacacaatccactgtctgaattgtctcataaacgccgtttgtcagctttaggtcctggtggtttaacacgcgaccgtgctggttatgaagtccgtgatgtgcactatacgcattatggtcgtatgtgtccaattgaaacgcctgagggaccaaatattggattgattaataacttgtcttcctatggtcatcttaataaatatggatttatccaaacaccataccgtaaagttgaccgtgagacaggtaaagtaaccaatgaaattgaatggcttactgctgatgaagaagatgaattcactgtagctcaagctaactcaaaacttaatgaagatggaagctttgctgaagaaatcgtcatgggacgtcatcaagggaataaccaagagtttccagcaagttctgttgaatatatggatgtttctcctaagcaggtagttgcggtagcgacagcatgtattcctttccttgaaaatgatgactctaaccgtgcccttatgggagctaacatgcagcgccaagctgtgccattgattgatcctaaagcaccttttgttggaactggtatggaatatcaagcagcccatgattctggggccgctattatcgctcaacataatgggaaagtggtttattccgatgcagataagattgaagttcgccgtgaagatggctcactagatgtttatcatgttaccaaattccgtcgttctaactctggaactgcctacaatcaacgtactcttgttagggtaggcgatagtgttgagaagggggactttattgcagatggtccttctatggaaaagggtgagatggctcttggacaaaatccagtggttgcttacatgacttgggagggttacaattttgaagatgctgttatcatgagcgagcgtcttgtcaaggatgatgtttatacttctgtccatttagaagaatttgaatctgaaactcgtgatacaaagcttggacctgaagaaattacgcgtgaaatcccaaatgttggtgaagatgccctgaaagaccttgatgaaatgggaattattcgcattggtgctgaggttaaagaaggtgatattctagttggtaaagtgactcctaaaggagaaaaagatctttctgcagaagaacgcctcttgcatgccatttttggtgacaaatcacgtgaagttcgtgatacttctcttcgtgtacctcatggtggcgacggtgttgtttgtgatgtgaaaatctttacacgtgctaatggagatgaacttcaatcaggtgttaacatgctggttcgtgtttatatcgctcaaaaacgtaaaatcaaggtcggagataagatggccggacgtcatggtaataagggtgtcgtttcccgtattgtaccagtggaagatatgccatatcttccagatggaacacctgttgatatcatgcttaatccacttggggtgccatcacggatgaacattgggcaagttatggaactccatcttggtatggctgctcgtaatttgggcattcatattgcaacgcctgtctttgacggagcaacttctgatgatctttgggaaacagtaaaagaagccggtatggattctgatgctaaaactgttctttatgatggtcgcacaggggagccgtttgataatcgtgtatcagtcggtgttatgtatatgattaaacttcaccacatggttgatgataaattgcatgcacgttcagttggcccttattcaacgattactcaacagccgcttggtggtaaggctcaatttggtggtcaacgtttcggagaaatggaagtttgggctttggaagcttatggtgcctcaaacgttcttcaagaaattttaacttataagtcagatgatgtcaccggtcgtcttaaagcctatgaagctattacaaaaggtaagccaattccaaaaccaggggtaccagaatcattccgtgtacttgtgaaagaactgcaatcacttggacttgatatgcgcgttcttgataaagatgataaagaagtagatcttcgtgatcttgatgaaggcgaagatgatgatgttatgcatgttgatgatcttgaaaaggcgcgtgaaaaacaagcacttgaagctgctgaatttgcaaatagtgatgagaaataagtgatttagtaacttagtttatcttttatgattggtacaccttaactatcatttgatactgatggaaaaagtcttgttttcgttattgatcgtgtaattaataacttgagaaactgtttttaaggtgttaactcttttattaaaagaaaactaaaatactatggtaagctagctgtctttgaattgattttttggaacagtctagctgatgagaattataagaaaggtaaaattagtggttgacgtaaatcgttttaaaagtatgcaaatcacattagcttcgcctaataaagtccgttcttggtcttatggtgaagttaaaaaacctgaaacaatcaactaccgcacactgaaaccagagcgtgaaggtctttttgacgaagttatttttggacctactaaagactgggagtgtgcctgtggtaaatataaacgtattcgttataaagggattgtttgtgaccgttgtggtgttgaagtaacgcgcgctaaagttcgccgtgaacgtatgggccatattgagttgaaggctccggtatcacacatttggtactttaagggaattccatctcgtatgggcttaacacttgatatgagtcctcgtgccttggaagaagttatttattttgcggcctatgtggttattgatcctaaggaaacaccgcttgaagcgaaatcgcttttgacagaacgtgaatatcgtgaaaaacttcaagaatatggctcaggttcttttattgctaagatgggagctgaagctattcaggatttgcttaaacgggtagatcttgatgctgaaattgctgaattaaaagaagaattaaaaacagcttcaggtcaaaaacgtgtaaaggccattcgtcgtttagatgtgcttgatgccttccaaaaatcaggtaataaacctgaatggatggtattaaacattttaccggttattccaccagatcttcgcccaatgttgcaattggatggtggccgctttgcgacatctgaccttaatgacctttatcgtcgtgtgatcaatcggaacaatcgtttggctcgccttttggaacttaatgcaccgggaattattgtccaaaatgaaaaacggatgctgcaagaggcagttgatgctttgattgataatggccgtcgtggtcgcccaattactggaccaggtagtcgtcctctgaaatctctcagtcaaatgttaaaggggaaacaaggacgtttccgtcaaaacttgttgggtaaacgtgttgacttttcaggacgctctgttatcgctgttggaccaacgcttaaaatgtatcaatgtggtgtaccgcgtgaaatggctattgaacttttcaaaccatttgtgatgcgtgaaattgttgatcgggatattgtccaaaatgtaaaagctgctaaacgtttaattgaacgtggcgatgaccgtatttgggatattcttgaggaagttattaaagagcaccctgttctgcttaaccgcgccccaacgcttcaccgtttgggaattcaggctttcgaaccagttctgattgatggtaaggcacttcgccttcatccgcttgcttgtgaagcctacaatgccgactttgatggtgaccaaatggctatccatgttcctctgtcagaagaagcacaagcagaagctcgtcttctcatgttggcagcagagcacattctgaatcctaaagatggaaaacctgttgttacgccatctcaagatatggttcttgggaattattatttgaccatggaaggtgctgatcgtgaaggcgagggtatggtctttaaggatcgcgatgaagctgttatggcataccgcaatggttatgttcatctccacagtcgtgtaggtatcgctgttgatagtatgcctaataaaccatggacggacgaacaacgacataagatcatgataacaactgttggtaagattctctttaatgatattatgccggcagatcttccttaccttcaagaaccaaacaatgctaatctgacggataaaacacctgataagtatttcttagcaccgggctccaatatccaagaagctattaaaaatcttgatttgaatattccatttaaaaagaaaaatcttggaaatattattgctgaaatcttcaaacgtttccgtacaacagaaacatcagctttccttgataggttgaaggatcttggttattatcattcaactttagctggtttgacagttggtattgctgatattcctgtcattgataataaacaagagatcattgatgctgctcaccatcgtgttgaagaaatttcaaaagccttccgccgaggtcttatgactgatgatgatcgttatgaagctgttacagcgacatggcgtgatgctaaggagcaattggaagcacgtttggttgaaacgcaggatgctaagaatccaattgttatgatgatggattcaggagctcgtggtaatatttccaacttctctcagcttgctggtatgcgtggtctgatggctgctcctaatggacgaattatggaattgcctatcctttctaatttccgtgaaggtctgtctgttttggaaatgttcttctcaactcacggagcacgtaaaggaatgactgatacagcccttaagactgctgattcaggttatctaactcgccgtttggttgatgtcgctcaagatgtcattattcgcgaagatgattgtggtacagatcgcggtcttactattacagctattacagacggtaaagaagtgactgaaacacttgaagaacgtctggttggccgttatactaaaaaatcggtaagacatcctgaaaccggagagattatcgctagtcctgatacattgattacagaagatatggcccattatattgctgaagctggagtcagtgaagtgactattcgttctgtctttacatgtaatacgcgtcatggtgtttgtcgtcactgttatggaataaatcttgctactggggatgctgttgaggttggtgaagcagttggtacaattgcagctcaatccattggtgaaccgggtacacagttgaccatgcgtactttccacacaggaggtgtggcttcaaacgctgatatcacacaaggtttgcctcgtattcaagaaatctttgaagctcgtaatccaaaaggtgaagccgttattacagaagtcaaagggcaagtaacagatattgaggaagatgctgctactcggacgaagaaggtttatgtcaaaggagcaacaggtgaaggagaatacacagtaccatttactgctcgtatgaaagttcaagtaggtgatgaagttcatcgtggtgcgccactgactgaaggttctatccaacctaagcacttacttgaagttcgtgataccttatctgttgaaacttatcttcttgcagaagtgcaaaaggtttatcgtagtcaaggggtggaaatcggtgataaacacgttgaagtaatggtacgtcaaatgcttcgcaaagtacgtgttatggatccgggagatacaggtttgcttccaggcattcttatggatattgccgattttacagatgccaacagagatattgttattgctggtggtattcctgcaacaagccgtccagttcttatgggaattaccaaggcatcacttgaaacaaattcattcttatctgcagcttccttccaagaaacaacacgtgtgcttacagatgcagctattcgtggtaagaaagatcatcttctagggcttaaagaaaatgtcattattggtaagatcattccggctggtactggtatggcgcgttaccgtaatcttgaaccattggctgtcaatgaaattgaagtcattgaagattctgaagaacaagaagacacagtagaagaataactatttaaaagtatacttatctcttaaaagataggtatgctttttcttatttttctcataaacgagcaaaattttttaaaaaatgagaattttcctatataataaaagcaataaggaaataaaactatgtatcaagtaatcagaatgtatggggctatggaaccatggtggtttttagatgattggaaagaagatattaccaaggttcttgaatttgataattatcatgaagctttgcagtgttatcaaaaagagtgggcaaaattacgtcgccgttattccgactttaacagtcatggcgatattatgacagctttttggaataaacaagatcaacattggtgcgaagaatgtggtgactatgtacagcggtatcattctcttgcgcttttaactgactggcaggaaacccctagctcttggtttcgaccaacatttactaaacaaaatgatcccccttttcgttccaaatgttttattaagcaaaagaatgaacaaggacaaaattagaaaagttaattcagtatttgtatatcgttttagactgagattcgttctcagtttttttctttttattcaaaataaataaaaaaccaaattttttcctggctttttcgaatagataagatgggaggttttatggttcaaaaattaggtagaaaaatcattgccgaagctgttcaaaataaagcacaagatatctatattattcctaaaaaagaatcttatgagctttatatgagaatagggaatgaaaggaggttcattgatgtttatgaccatcatttcatggctaatcttattagtcactttaaatttgttgcaggaatgaatgttggtgagaaaagacgaagtcagctgggctcttgtgattattcttatgatgaagggaaagttatttcattaaggttatcaagtgtaggagattatcgtggttatgaaagtttggttattcgcttacttttttctggacgtcacgatttaaaattctggtttaacagtatggatttgattttaaatgaaatcaaggggcgagggctttatcttttttcgggtccagttggaagtggcaaaacaagtttgatgtatcaattggtaaaactaagatttgagaccaaacaggtaattaccattgaagatcctgtggaaattaagcaagataatatgttacaactgcagcttaatgaaagcattgatatgacttatgataatttaattaaattatctctgaggcatcgtccggatattttaattattggagaaattcgagataaagaaaccgccagagctgttattagagcaagtcttacaggggcaatggtattctcaactatccatgctaaaagcattccaggtgtttatgctaggatgttagaattgggtactagttcagaagaattacaaaatgctttgcgtggtattgtttatcaacgtttaatagggggaggagggattattgactttgccaaaggggattatcaaaaccactcagcaaaaaagtggaacaaacaaatttatgacctttttacagcaggatatatcactgaaggagaagcacaagcagaagaaattgaagattaaaaagcaaagaaaagttatccagctttttaataatctctttactagtggttttaatttaacagaaattatagattttttagaacgaagtcacttgttagcagaaatatacacaaagaaaatgcgacaagggttgttgaatggtctgcatttggctgaaataatgagttctttgggattctcagatgatgttgttactcaattagcactttctgaagttcatggaaacactcaaaaaagtcttttaaagattgaatcttatctaaataatctgatacttgttaaaaagaaattagttgaggttatcacttatccgatcattttattgatttttcttgtcgttattatgttgggattaaagaattatttattaccacaacttgaaaggggaaattttgcgactcggttgatttctaatttcccaatacttttcttgctgggatgttgcttttttattttactagttggtatttttactttcttttcacgaaagatcagtcgtctgcatttaattggtttttgcagccatttgccttttgctggtaagtatttgcaactttatttaacagcttattatgcacgtgaatggggtaatcttattgggcaaggagtagaaatggctcagatagttagattgatgcaagatcaaaagtcacaactttttagagaaattggctatgatatggagaaggctctgctatcaggtcaagagtttcatcaaaaagttttagattatcctttctttttaaaagaactcagccttatgattgaatatggagaagtaaagtcaaaattgggaaatgaattggaaatttatgctgaggaaacatgggaacacttttttgcaaagttaaaaaaagcaacacagtttgttcagccactcatctttgtttttgtagctattgttattgttatgatttatgcagccatgcttttgccaatttatcagaatatggaggttaatttataatgaaaaagatcaagagagtcagtgtacgagcttttacgcttatagaaatgttagtagttcttctcattattagtattcttttactattatttgttcctaatttaactaagcaaaaagataaggtaaaagatactggcggttctgccgtggttaaagttgtagaaagtcaggctgagctttatgagcttaataaaaccgattctgctactctttctaaattagtagctagtggtgatattacacaagaacaggcaaattcatacaaggattactatgcaaaacacccaagtaaaacacggcatgtcgcgaattaaagcttttacgcttatagaaagtttagtgactttggcaattactagttttttgattttaagcttttcaggtagtataactcaaacgtttgccaaagtagaagagcatctcttttttctttcttttgaacatctttaccgtgacacgcaaaaacttagtgtttatcaaagacaagatatgactttaatattaaaaagcgaatatatctcaaatggtgttgaagtacttaaaatccctaaggatgtcaaactagagaggaataaaactttgcactttgatcaggcaggaggaaattcttctttagaaaaacttgtttttcaaacatctgatgaaaaaagagttacttatcaattatatataggaagtggtcagtataaaaaaacagaaagttaaagcttatattcttctagaaagtttagttgctttgggacttttcgtaaccatcacaactttaattcttactcagttgagtcattatcaggaaagaacagctaaaaatttacaaaaacaagaaatattgaatttagcaataatggctcttcaaactcagcaagatcatttaagcttcaacggcgtcagtgttacggttgttaaaaatcaaggggaaactatagtttatcatgatcatgaggaggttatcaatcttgttaaaaagtaaattgaaagctttcacacttttagagtgtctccttgctttgcttgtcattgctggtagtgtatctgtttataatggtctaactaaagctattagtagtaatattcattacttatcaaaaaatcaagaagatgcttggttacttttttgtcagcaatttcggtctgaacttgaaggaacgactttgcaaaaattggatagcaataagctttatgttcaaaaaaataatcaaagtttagcctttggtaaatcaaaagcaagtgattttagaaagactaacagtgatggacgtggttatcagcctatgttgacggagatcaaagctgctaattttagtcaatcaggaaaaattattaaattagaccttactttcaaagatggtttagagaggacttttgtttatgcttttcatgaaaaaaattaaagcaggcgtacttctatatgctctgtttatgtcagcaatctttagtcttttcttacaattttatcttaatcgtgttgtagcaacagagagacaaaatcaggcacaattatcggccagtaaagcttatcttatagcagatctaactcaagatttggctaaagacaactttgggcagttgacttttaatcacggaaggtctagttatcataaacaggagggggaacttctgataaaagtccatttgacagatggtcagtcctaccaatatcgttttaactgtgtaacagaaaataaggaaaaaggaaaatttagtgtggctaataaaacttttactaaatctatagaaaaacgtcattttcaaaaatagttactgcctttgcgactttaagtcatttttgatatgataatcgtggaggaaatcatggattttgaaaaaatagaagctgcctataacttactgttagataattgtcaaaggctggaaactcaacttcatactcacctttatgatgccttaattgagcaaaatgcttgctatctaggtgctgaaggtgctgatgattttattaaagaaaataataaaaaactgcgtcagcttaatctaagtaaagaggagtggcgtcgtagttttcaatttatttttattaaggctactcaaagtcagcaattacagtcaaatcaccaatttacaccagatagtattggttttattattctttatttattggaaggtttaacaaataagagtcagttagacatcattgaaattggttctgggacaggaaatcttgcagagactattgtgaataacagttcaaaaagcattgattatatggggattgaggttgacgatctgttaattgatttatcagcaagtattgccgatgtattggattcttctgtgcattttgttcaagaagatgcagtgcggcctcagattttaaaagaaagtgatatcattatcagtgatctgccagttggcttttatcccaatgataaaattgctcagcgttatcaggttgcagccaagttaggacatacttatgcacatcatcttttgatggagcaatcgcttaagtatttaaaaaaagagggacttactatttttttagcgccagtggatcttttaactagtgagcagagtcctttgcttaaaaagtggttacagaacaatgtaactattttagccgttatttctttacctgaggcaatttttaaacagaaaagtaatataaagtcaatctttgtcttaaagaaacaatcgcaacaaagtttggaaagttttgtctatcctttgacagatttacaagaccccgaagttttaagacgatttatgaaaaattttaaaaagtggaaggaagataatgtcttttaagagataatttgttataataactttgtattatcgtaaacgatttcatgagaggtatattatgtcaaaaactatttcaattaatgcaggttcttctagccttaaatggcagctatacttgatgcctgaagaaaaagtacttgcaaaggggttaattgagcgtattggcaaggatgatgctatttctactgtaaaatttaatggtcaagaagcttcagaaaccttagctattaaagaccatactgcagcagtgaaaattctcttagatgatttaatccatttggatattattaaatcgtatgatgaaatcacaggtgtagggcaccgtgtagttgctggtggaacttactttaatgaatccgctttagttgatagtgaagaagtcattaaaaaggttgaagagttagcactcttagcgcccttgcataataaagcaaatgctgcaggaattcgagcatttaagaaaattctaccagatattaccagtgtcgttgtctttgatactgctttccacactacgatgccggaggttgcctaccgctatccattgccgaataagtattttacagaaaatcaggttcgtaaatatggagctcatggaactagccattattatgttgctcatgaagcagccaaaatattagaaaaaccgattgaaaaacttaaattgattacggttcatatgggaaacggggtttctcttacggcagttgatggcggaaagtcagttgacacgtcaatgggctttacaccactgggtggtgtgatgatgggaacacgaacgggagatcttgatccagccgttattccttatttaatggataatacagaagattttaaaacaccagaagatattcgccgtattttcaataatgagtcaggtttgctggggatttctgagttatcaaatgatatgcgtgaaattgaggcggctacagcagctggtaataagaatgctaccttggcttataacatgttcattgaccgtattattaagcatattggtgcttacgctgctgtgatgaatggagttgatgctattgtctttacggcgggtattggtgaaaatgatgctcatattcgaagcgaaattatgaaacactttgattggcttggagctgatatcgttaccgaaaagaacgaaaagcgtccagtttacggggtcatatcatcgaatgccgctaaagttaaagttttggtgattcccactgatgaagagcttgttattgcacgtgatgtcgagcgtttgaaaactaaataagttatcaattttaatatgataagaccagaaaagttggctgagcaattggtcagcttttttgattgacgattttagttcatttcgctctgtatgtggtacaatagtgaatactcatcattatctagaagatcaaaagggctttttgacaagacttaaaataaattttataaaaaatgtaaaataagcttgacaaaatatgtaaagtgaactagactataaatgtaaaagagatttgacatctctcactaaatagtaattatgggggataagatatgctatgatcattaaaaagatatttagtcaagaatatttcagtacaactttagtcaaatagtcaaatagtcaaatagttaaattaacactgctattaattggtttatttattgtcataacagctatacaaatgctatttagatttttgtacaagcttttagcaggagcgagtatcagtttatctcttttatgggtctattcgataggactcctgaaaaatcagacaaagttagtcaaactttaagttagattttataatgcccattaaactttcttggaggacaatgatgcagacgagaattcaagaattacgaaagattaataagttgagtcaatcggaattagcagatgccctcagtgtgactcggcaaaccattatttccttggaaaaggggcgttataatgcctccttggaattagcatataaaattgctaaatattttggaacaacaatagaagatgtttttatctttgaggatgagaatagaggagatggtaacaatgtttcaaaatttaggaaagaaaaaaagtaaggaagaatataaaaaatcacagcaggcaatcggcagctgtctgatatgtattggtggtttactactggttttatctttaagtgtatcaatgtcagattttgcagcgggatttttgataggaattagcattggtatgaacctattgggaatcatagcttttacaaaaactacaactgataagacattgacacgctactacatagcagcttatgatgagcgtaataaacgaattcgtagtttgacagcacagttaactttggctgttttaatattgttgatagtagctttagtagttttatatgctttttggcatatcgctttcagctatctgattactctgatgattcttctttatgggacaatcatatgtggcgttttacttagagtgttcttcaatcacttattgtgatgtaaaagatgctaattattagaattaattatataaagaaaaaaggagaaatatgaaaacaattttaaagaaaacggcagcagttattgctattgttggtttgtttattgttagtcaactgccaagtattgtgatggcactttggcagagaaatcaacatcagttagaattatggcaatccattgttattttgattttgcaactaatggttcttattggcttttatattttggctagaaagagaaagttaattagttcgggaatcaagtattggttgagttggaaaacattgggaattgcttctttgggttttgttgctctctttattgtcaaaattattgctggcatcattttgacttatgaaggaaaaacaacaaccaataatcaagagacaatcactcaaatgtttaacaattcatcgttattgctgatgttcatgtttattgttattatcgctcctttaacagaagaaattatctttaggggacttattcctcaactattttccaaacgttttgaaggacttggttttggacttggagctttgctttttggtttacttcatggtccaagtgatattggtagttttgttctttatgtgggaatgggtactattttagcttttatttgttataaacttaaacatttggaatacagtatttggactcatgcacttaacaatagtctcggttttctgctattattatttaaataaaatgacaaaaaactaggaactgagtagattcttaatagtcagagatacatttaactattaagaatctactcagttcctagtttttttacatgttttttgatttgtcaattgtcgcatcaatggctgaaatggtactgactgtaaagccggttttttctagatcaagaagtccagcgatagttgtcccaccgggactggataccttatcaataagatcgtttggcttctcttgcccttggatgagattgctcgtagttgctagaacagtttgactgacaatcttaaaagctaaatctttgggaaatccgtgtttcaatcctgcttttgacatagcttcaataaagagtgcaatataagcaggactggaccctgcaagtgcggtgaaagtatcaaaatctttttcagcgatttcaaaagttgttccaaatgagtccgtaatctgtttggcaatttcaaaaagctgatcagaaactttatcatttcggcagatagcagtgctactttgaagaatcttagcattaagattaggcataatgcggataatcggtaaatcagcctgacttaatttatccagatattctaatgaagtaccggctgccatggataaaatcggttttgttaatattaaaggattcaaaacagaagcaagaacttgtggtttaacacccaatacaagtaaatcaacctcgtcaaccaattcttgatgagattgagcaacagcaactccaagtgcttctgctttgtcttgaccggctttcaaactgctatctgatatgattaattcaaaatcggtttttttgagtccagtaataatagcgctggccattttaccaacaccaataaatccaattttcatagtcaaatgtcacagtcagagataaatagtatagatctgactgtgtttttcctttctaatagtttttgattaaatcaactgtagagcgattaagttttttcacaatagtttgcagaaaagcttgagcctgtaagaaatcatccattgcatagagtgtttggtgagagtgaatataacgagcacaaacgccaattgttgttgaaggaattccgccatttttgaggtgagcagcaccagcatctgtactccctttagcacaatagtattggtatgacaccagcttcttgggcagtagtcaacaaaaagtcacgcatgtctttaagcatgacatgacccggatcgtaaaagcgaatgagagtgccctcaccaattttaccttgattgtcatagacatcaccagcaggtgagcagtcaactgccagaaaaatatctggcttgaatttggttgttgaaacctgagcaccacgaagaccgacttcttcttgaacattagcaccagcaatgagggtattgtctagctgttcattttttaggctttgaagaagttctgtaaccatgagaacaccgtaacgattatcccaagccttggaaatgacattcttttgattagccgtcagaatagcttctgatttaggaataatgatatcacctggggttatgccaaagctttcagcttctgttttatcagcaaaaccgccatcaaaaacaatatcttcgaccttgggtaaagaagctccgccgttattaccacgtagaaaatgtggtgggacagaacctgaaataacaggaatcgcctgttcagtgcgtgtataaagggtgaagcgttgtgaactaataaccagaggattccagccaccgatagccaccgcgcgcaaagtgccatcttctttaatatcgctgaccataaaaccaacttcatccatgtgagcagcgaccatgacacgaggagccctttccaacttactatgtttgatgccaaaaaggccaccaagaccgtccgtttcaacttcatcaacgaaaggcgtcattttttggcctaaaaagtcacggatcttgtgctcataaccggcaatgccatcaagttcggtgatttctttgattttgtcaaataattccgtcatatttaacctcaattctatacgttctattttagcatgttttatgataaaataaagaggttatggaaagtaaaaacttcaaacttgcttcaagtgcttgtcttataggaataggcggagcagttttgcttggaacggttgtaaaaaaacaattggaagaaagaaagcgtgaacgtattaaggcagagcttcgccagttttttaatcagttgggtgagattgctgtcctctacgtcaatgaatttgaatctaacaaagatacgatacgaggtggtcttgtcatgaatgatgagactatctatctttttacttatgagaatggtcagataagttatgaggaggataaacgtgattgttccaaaaacgtatgaagaattggccgcttatcttgaaaagcctgacaagcttgtccttttctttacagcagattggtgctctgattgtcaatttatctacccagccatgcctaaaattgagctggcaaatccagactttctttttcttcgtgtagaccgtgataatttcatggaaatcgcgcaacgctggcatatttttggtattccaagttttgttgtcgtagaaaatggtaaagaaattggccgtttagtcaataaatcacgtaaaacacaagcagagattaacagctttttggctgaattaacagaggagaaattatgatttttacatatagtaaagaacacgttggagatgttcttatggttattgttaaagatagtaagggcgcaaagttaaactgtgaacgcaagggtaaggtgactcgtatttttcttgaaaaaaataaggagacagtggcttggaatatttttgcggtatcaaatttgcttgatcttaatggcaatggacaggtatttttgacagatgaagagctggcggttttaaatgctgaacttgccaaagaaggttttgaagaaaaattagaaaatgatgccgcagctaagtttgttgttggtgaaattgtagaaatggttgctcatccagatagtgatcatcttaatatttgtcaagttaagattgctgaggacaagactgtccaaattgttgctggtgcaccaaatgccagagtaggattgaaaaccattgttgctctgccaggtgccatgatgccaagcggtggcctcatttttccaggcaacttacgtggcgaaaagagctttggcatgttgtgttctcctcgcgagttagctttgcctaaagctcctcaaaagcgtggaattattgaattaagtacagatgctgttataggccaagcttttgatgctgggaaacattggaaagggtgagaaaaaacttcgtcatgaaatgacgaggttttttcttgcaggaattctttttttgttatataatcaatttaactgataatcagaaaaggtgattatattgaaattagaagattcttggggatttcagattagtaagattgctcaagagatggacagtcaattttcgaagaagctaacaaaatatgatatcggttccagagaatacggtattttgttgacaattcatcaatatgcactgttaacacagcttaagattggtgaactgaacaaggttgatcgtacgacaattgggcagcttgttgatttattagaaagaaaagactttgtggggagacaaaagaatccaaaagatagacgacaaaatttactagttttaactaaaacagggcgatctttggttgaagaaatgtggcaggaaatgaaagagatagaaaaagacgttcttaagcatttgtctgctaaacaaaaagaaacgcttttaacgatggtaaaagcaattaggaaaggagagttgaactgatggataaacttgcatttttagaaatgtatcttgatttatataggaattattttacagttttggaggccatgaaagcagaaaatccggaaattgtggtgttagatattagaaatgctccatcacagattaagaaagagcaaattaaaggagcaaaggttatgccagctaaggacttagctaatcatttgacagagcttgataaaaataaaacctatattgtctacgattggaatggcggcagtgttttaggtaagcacgccttatttattcttttgaaggcaggatttaaagcatatgaattagcaggagcttttgaaggatggaaaggcatgcatttgccaacagaaaaatgctgacataagataattgtagatttttttaattttagcattgtttttctttcttttttgcgaatactaagataggaggaaaaagatgtattatgtataataaagttattttgattggtcgtttagttgcgacacctgaaatggtaaaaacaccaaaggataagtctgttacgcgcgtgacactggctgtcaatcggcgatttaaaagtcaagatggggaaaagcaggctgattttgtcaatgttgttctttggggcagattggcagaaacaatagcttcctatggtagtaagggaagtctcatctctcttgatggagaattgcgtacccgtaaatatgaaaaagatggcgtcactcattttgtgactgaagttttgggacactcctttcaattactggaaagtcgtgctcaacgtgctatgcgtgaaaataattctgaaaatgatttggccgatttggttctggaagaggaggaactccctttttaaaatttcaagtcaaaagtagggtttaggctatgaattttctaagacttaccattgaaataagataaaaacctaatctctgcaagttattctattgttttattttattcctaaatgatcaggagatattatattttagattttaagagtttctaaaacacaataattaagcagaaaaagaaacttgtgtagttactagctaaagtaagagagtgattatagttcaatctttattttttggactgtaatcattcttttttagttcaaataaatgattttattttctaactattaaataaattggttaaggcgagaagagttttattgacttataagaggggcgtttgccaggaagtaatgaaagtgttaaactaatgaaaaagatttgtttgaaagataaaagaatacggaggaagtaatgaaaatacagagtttagtgaagtctctagcctgcctttttgttgtgctaattatttcaagtctgtttttttattataaagaggaacctgtttttccaaggcaaactaagattggtgctacttatatgacaatgaataatgatttttataagtatctcaatgctgaagtggaaaaaaatgttaatgagcaacacgatttactttatacgcgggatccggctcttagtattaaaaaacaggttgaacaaattcggttttttattaaggagagagttgatgttatcattattaatccagttgatggtaatagcaaactcttgattaatagtcttaaaagagctagaaagcaaggtattaaagttattgcagtagatagtccgtttaaagataattctgctattaacacgaccattgtctcagataattataaggcgggtgtactgtgtgctcaagaaatgatacgaaaacaaaaaggtgctaaaattcttcttttagagcatcgtaatgctttatctgctacaagtaggatacaaggctttcttgataccattaaaacgcataaggactatcaggttgttgcacgaattgatagtttaggacagacagaaattgccatgcctaaagtaaaaaaacttattgaaaatggtttaacatttgatactgtcatggcgctcaatgatagagcagccataggtgctttagcagcagtaaaaggtgaaaaattaccaactaatccttatatttatggtattgatggttcaccagatatgaaaaatctgctttcagccacttcagaagtgcaagcaacggtagctcaatcaccttatactatgggacaggaagttacaaaggcaagtcttaaattatctaagaatcagacttatcctaagagaattgttgtgcccgttgaattaataacaaagaaaacaatcgggaagtatgatttaacagggtggcagtgatgaatagttataagtatttaaaatacagtcaatatgctaagcaggctttaatttttattaattttttggcagttacttattatgtttttgtttatctttttgctagcaaatatattgtggctaaaaatttaagttatgttcttttggataaactagatattgtccctatagcccctgaaaatatcttttttacaacactcttcttttttgccatctttctcattgtcatgttttatagagaaagtattcttaataaaaaggaagagattaatgattggttgattgttgcagaaattgtcttaatgattcttacctttatttccttgcaattttcttacaatgggctgttcctcctcgtttttgcagatattttttatagttatgctaatttttataatgttaaggagcaaaaatattggcttcttttcatcattctaggctttagtatgcttttgatctcaaatttcgatcttttatctctggtgatgagactaccttctttagatgtttacattagcttttttcctagtggcagtcgtctgattgttatgtttattaaaaactttctttactcgctcaatatcattgtttttctaatttctttagtggcttatatcatgtattcagtagctgaaaatcataagatagaagaagagctgaggatggctgcacgtgctaatattgaactaaatgattatgtttctttggctgagaaaatcgctgaggataaagagcgtaagaggattgccagagaaattcatgataccttggggcatgccttaacgggtatttcagcaggaattgacgcagttactgtgttagttgattttgatcctaatcatgctaaaagccaactaaaaaatgtgtcagatgttgttagagaaggtattcaagatgttagaaggtctttagaaaaaatgaggccaggggcccttgaaaagggaagccttaaagaggctttattaaaaatgattgcagattatgaaaaattatccaagctacaggtcagtctgcattatgattgggataacattgatttagacattactaaggaagatattattttccgtgttattcaagagactattaccaattcccttcgacatggacatgcccgtcatgtcagtatcgatatgctcaatgaggatttctatattattaagattaaggacgatggtattggctgtgaggattttaaattggggtatggtttaacacaaatgcaagaacggttagctattattggaggctatgcggactttgaaagtgatgatggttttcaaacaatggtaagaatacctaagaaaaaaggagaagaatagtgattaaagtcttgattgctgatgaccaagaactcatcagagaatctttaaaaattgttttgtcatcctataaagacattgaagttgttgatgcagtcgatgacggttttgcggttttagagagtatgaaaaaagttcaaccggaccttgttttgatggatatccgcatgcctaaaatggatggcgttttatgtaccaaggccgttaaggaaaattaccctaatgttaaagttattattttaacaacctttgatgatgatgattttatttttaaagctcttcaatatggtgcttctggttacattttaaaggggatctctatggaagatttataccaggctattgtgacagtcaataaaggaaatgccatgattaatccagatgttgcaactaaggttgttaagctgttttcacaaatggcgcagtctaattctgctattcaagtacaaggaaatagtgtcgaaaatatttcaaaggctgagtggaaaattattcagcaaattggttttggcttatcaaataaagaaattgcagctaagctctttttgtcagaaggtactatccgtaattacctgtcgaccattttatctaaattgaatttgcgtgatcgaacgcaattagcgatttgggcagtccaaacgggtgttactactagacattttggagatgaaaatgattaaaaaacggctttaccagtataaatttcacctattggtcttgttgatacttttaggagccctgttaaccttatttcttgtgcaatcgcggcaaaagaaaatcttgagattaggtgtttatgctggcagtagctgggatgtacccagtgggaaagattatcaatttttagatagtgtcattaaacggtttgaaaaggctcatccaaatgttgatgttcaatatgagactggcattttaaaagaagattattcttcgtggctgtctaaaaaaattgttgagggaaagcaaccagatgtttttatggttcctgaaaatgattttaatcttttagcttcaacaaaaactttagctaatttagatagttatattaaaaaagatttgaaaccttcgctcttttatcattcagcctataattcaggtcaatttgaaaggaaacaatttgcccttccctttgaaagcaatcctgttatgatgtgcatcaataatgatctcttaaaaaaagagggaatagagttaccaaactcttcatggaccttaaacgatttttatagtatttgtaaaaaagttactaaggatacagatggtgatggtgttattgatcaatatggcagtctaggttatggttgggaagaggctttagctgcctataatgttaaattatttaatgaaactggtacagaggcttactttaacaccaaaagagttcgttcggctttagcattagtcacaaaattaaagagcttaaatggtaattataatgttactcttaaagattttgatgagggtaaggttgctttttaccctatgactctagctcaatatcgtacttataaaccctatccttatcatgttgcaaaatactcttccttttcgtggtcttgtgttgaaatgccttcacaaaaaccaaatacggcgaagatacaaattaatacatctttatatgctatgtcgtccaaaacttcacagtctaaattagcttgggagtttcttaaacttttatgtgccaataaaaaatcacaacagcaattatttgaagaatcacaaggagcatctgttttaaaatcagtaatgaacagtcaagcaagtaagaaccttttgcaaaatgatagctttggttcaaaagctttgactgttaataccttggacaatatgatgcgaaaagcgaaaacgactcctaaatttaaatcttataatactatttatgaaaaagcaggctatcttattaccaaatcgttggaaggaaatactgtagaaaatgatttatctgatattcaaaaagaaattgaagaagaattaaagtaggtgaaacaaataataaaactgggaatttagataaaaaagtctaaaagatacgaagactgttctacttgctgtcaataacatcaaaaagtctggaaaaaattcccagactttttgagcagtttctttatattttgagtgtttacagtattttctttgatcagtttaaaaaatttaaatccctgacaaatgtcatctgctgaatgacatttgtcagggatatgaaaatgacaaatgacactgcaaaagcgttttcaaaaaatgtaaaataaaaatgaaataaaaaagaaagtagggtgtattcatgaaatacctattgcttgtaagccatggcggttttgcgcagggcttgaagacttctttagctatgtttgctgaggataaagtaagtcaagttatagctgtcggattggaaaatggtaaatcagtagatgattttgcggaaacttttagacaagctctttctaatctaaaggatgaggattcagttgttgttttagctgatattgtcgggggaagccctttgacaacagcttgcaatgttttggcggatttgggtaagttagatgacgccattgtcttaggggggatgaacttaccaatggcagtcaatgctgttgttatgaaagatatgcttgaaggtcaggattttgtaaccactgttttgggtgaagctaaaagtgccttacaagaatttaggataacttctgatgaagaagatgatgatgacatttaataaagaaggagaagaaaatgactgtatcatttgtaagaattgatgatcgtatgattcatggacaaactgtaacacgttgggcgaaagaatacccatgcgatggtttaatcgctgttaatgatgccgcagcaaaaaataaagttttaattcaggcttacaaaggtgcttcagataaaaagacttttgtttggtctaaagaagcctttgctgctaaatcacaaaaggtatcggattcagatagtcgttactttttaattactaaaaatccggttgatatgaaagaaattttggttgaccaaggttttgttccgggtgaagttaaggaaattattgttggtcctgccaacgaccgccccggagctgttaagcttggtaataatcaatctataactcaagaagaagcggatgctattgaagcaattgaaaaggctggctataaagttaaattccaacttcttcctgatgtttcaattggttattggtcagatttcaaaggtaaatttggttattaagtgttgaagtactctatcattaagtaggatggcgaacgaagtgagcttgagcgaaggcttttcgcaatgatattccaaacagggtcactcacgtccgtactgcttaaaaaagtatcaaaaagtaaaaaagaacatgagttacgacactgtgcaaaaagataaagactgcctaaatgctgtcgcaccttcatcagctttcctattttgcggtgtgtcgctttacgcctttgtatcttaataaattgaacacgagctacgagctgtgtcaaaaaggtagtttcttctagagtccagtcctgtgactcttcgtcaaaactcctattttgcctttgctcgtgaacgctctttgtatcttaaataaaggagaattattatgacaatttcttggtttcaagcagccttgctaggattgtttgcctgtttgtcttcaatgcctggtcttggcggtacaacaattggtaactatactttgggacgccctttagtcggcggcttggtttgtggacttatcctaggagacattaagacaggtattgtttgcggtgttgctatgcaacttgtttacatcgctcttgtaacacccggtggtactgtttctgctgatgtgcgtgcagtatcttatatcggtatcccattagcaatggttgcgattcattctcaaggtttatcagcaacttcatcagatgcagccaaccttgctaaatcaatgggaacccttgtaggtactattggtacagtgcttttctatggtactgcaacaatgaaccttgtttggcaacacattggatggcaagctgttgaaaaaagagaattcaagagactctatgttgtagactggggacttccatggatctcgcatatcgtcttttcattcattcctacattgattatgtgtaaattaggtgcagatgccgttactgctcttaagaatgctcttccaatggatggtattccaatgaagactctctttacggtgggttcacttcttccatgtgtagggattgctattttattaaaacaaattgttgaaaaagcagttgactttattccattctttgttggtttcactttggcagcttcacttggtttaaacttagtatcatgtgcagtcatttctttaatttttgcagtactgttctatgaacttgaaacaataaagaatatgagagcaacggcttcggctgaagcttcagatttcgatgacgatgatgaggaggatatttaaaatggctcaaaagaaaatttcaaagaaaactttaacgaaatctttccatcattggtattatggtaatttgacatgtttttcacaagaacatatgcaaacatttggttatttgacttccatgttaccaattgtagaagaactttatgataataaagatgatcaagcacgttctatgcaaacttatacagctttctttaatacagaaccacagttaggttcactggtagttggtattacagcaggtcttgaagaagcgcgttctaatggtgctgatggtgtagatgatgaaacaattaatggcttgcgtgcaggtcttatgggaccaattgcaggtattggtgattcacttgtagttggtactttaattccaattattttgggaattgctcttggactttctactgatggctcaccaattggtgccatcttctatatcattgtttggaacttattggcctactttggtatgagatttgcctatttcaaaggttatgaacttggtgataaagcagttgaagtcttagttggaacacaaggacaagccattcgtaaagccgttgctattgtcggtggtatggttgttggggctgttgcagctacttgggtgcctatcaaaactgctctggaacttaaaaattcttctgggaaggctttcttggttttacaaaaacaacttgatggtgtttatccaggacttttaaccgctctatttaccgtcttttgttggtggttaatggctaagaaaaatatgtctccaattaaagttatgcttcttttagttgttattgcttttgttggtgttattacaggattctttgatccaggcttgaaatactaagattagaaatgattggagagattatgctaacagaaaaagaattcatcaaaggatatgaaaatgaaatcgcttatcaaaaacatatgattgaaaacctaggacgttggtttactttaatgtttatcattgctagtatcggtgtcgttttgatttacttattctcagctaatctcgttgggtttactattggaattgttttgacggccttaggattcttagctatgttagtctttggttatggtatttacaagggtcgcctcaatgttcaaaaagtcgttgatgattttgaagaaaaactgcgacttgccaattctaaataatctgaaaaaactttaccgaaaggtaaggtttttttcttgactatttttgaccaagtgatacaataatatatgtaattagcactcagtatattggagtgctaaaaatctatggaggtatattatgttaaaacccttaggagaccgagtggtcgtacagttgaaagaagaaaaggaacaaacagttggtggttttgtccttgctggtgctagtcaagaaaagactaaaaaagctcaagtagtagctgttggtgaaggtgttcgtactttaactggggaattggttgcgtccagtttagcacaaggcgatactattttaattgaaaatcatgtaggaacgcctgttaaagatgatggtaaagattgccttatcattcgtgaagcagatgttttagcagttgtaaacgattaataaatagcagtttaactttatagtcatttgagattatttatacacttttagtattgtagcggcagtacgaatgaaagtgtttcatattatttagaaataagaggattaattatggcaaaagatattaaattttcagcagatgcaagaagcagtatggtgcgtggtgttgatattttagcagatacagttaaggtaaccttaggccctaaaggacgcaatgttgttcttgaaaagtcgtttggttcaccgctcattactaatgatggtgtgaccatcgctaaggaaattgaattagaagatcactttgaaaatatgggagctaaactagtttcagaagttgcttctaaaactaatgatattgccggtgatgggacaacgacagcgactgtgttaactcaggctattgttcgtgaaggtttgaaaaatgtgactgctggagctaacccaatcggtattcgtcgaggaatcgaaacagcagttgcaacagcagttgatgagttgaaagctattgcacagcctgtttctggcaaagaagctattgcacaggttgcagccgtttcatcacgttctgaaaaagttggggaatacgtttctgaagctatggaaaaagttggtaacgatggtgttatcactattgaagaatctcgtggtatggaaacagagcttgatgttgttgaaggaatgcaatttgatcgcggctacctttctcaatatatggtaactgacaatgaaaaaatggtggcagatcttgaaaatccttatttgttaattacagataagaaaatttcaaatattcaagatgttcttccgcttctagaagaagttcttaagacaaaccgtcctcttttaattattgcggatgatgtagatggtgaagctctcccaacgcttgttttgaataagattcgtggtactttcaatgttgtcgcagtcaaggctcctggttttggtgatcgtcgcaaggctatgcttgaagatattgctgttttaacagggggtactgttattactgaagatcttggtctagaattgaaagatacgactattgatgcgttgggtcaagcagctcgtgtgactgttgataaagattcaactgttattgttgaaggttctggcggtaaggaagctgttgctaatcgtgtcaatctcattaagtctcaaattgaaacagcaacttcagactttgatcgtgaaaaattacaagaacgtctggctaaattatctggaggtgttgccgtcatcaaagttggcgcagcaacagaaacagaattgaaagaaatgaaacttcgcattgaagatgcgcttaatgctactcgagcagctgtagaagaaggaattgttgcaggtggtggaacggcacttatcaatgttattgaaaaagtagcagcacttgatttaacagatgatgctgcaacaggtcgcaatcttgttctgcgtgctcttgaagagcctgtccgtcaaattgctaaaaatgctggttatgaaggatctgtcattattgataaattgaagaacagttcagcaggtacaggtttcaatgctgctaacggggaatgggttgacatgattgatgctggtattattgatcctgtcaaggtaactcgttcagcccttcaaaatgcagcatctgtagctagtctcattttaacaacagaagccgttgtggcggatcatccagctccagaagcaccagcagcagctcccgctatggatccaagcatgatgggtggtatgatgtaatttagcttcttatcgtggcaagtccgtgaaacggcttaatgctggtcattaatatttttaagagaatctggttaaaggctaggttctctttgtgttgtctaaaatagtgatagcatatagttaaaagtgagttcttgctgtttgttattgctatagtttttatggatattttatcttgtagttaaccttgttacagtaaaaggtgctgtttcaaatttttaagcgtgttaattgtttaaaaacagttgattttgatagttttgttattattttgttatcatttaaaaaaagaaaaaaagtataatgcaaaaatacattaattttgacctatcaacaaaagaagtgatatacagaaggagttaaatttagaacctgtatcacaaaaaaactatttttattatatgagataagcgccgtcttagtaaaagaatagcttacgccgtggtaaaaagttattgaggtcagagacaatattgaggggactttcgatatcctaaggctcgaaaatataggcataggaactctttgagaaagttacttgcgtaccaaatactgagagctgactgacaaaaaagaagtcaatcagataagaatagattttctaaagtctattataaaattttaattgattcaaggagttcaagatggatagattaaaagaaaagtggcagaaatactttaaagaagcacaagaaacagtggctactcttgtggggaaattaaagcagcagctgcaagatcttcttaagagaaaacctatacgtacgactttaattattatagggagcttctttgttctttttggattatggggaagtattcattattcaaaagcagctacccttgatcgttatttaaaggctagaagtgcttctggtcatacttttgaaaatattaaagagtatatggtttgggatgatacgaatgaattgataaccaacgatgaggctcaatatacaaagttttcacgtctgaagacaagtttaaaaaaacgcagtctccgacagaaactattatcagcaaaagcttcggataaactctatctcaaaagtattggccataaatttttcttttttcctgattatcgtcttgccatgaaaccattgaaattaacattaaagacgaatattccaggcttagatgttcttttaaatggtaaagaaattgctactagtgattcagataattatcatgttacggttgcgcacctacctatagataattatacctttactcttgatggtatccataatggtaaagaggtggaatttagtaaaaattatgatggtaaacatcagacggttaatatgaacttagccttcaaaaactttacagttaagagcaatttatctgatggaaatctttattttggtaaaaagaaaatttcttccctctcaaatggacaatataatgttgataattatcctattatgggaagcaaatcggtttatgttaagaaaaatttttcagatgggacaatcaagtctaacaagcaatctctaaaggatattgcagacggcagcacagttcagcttgatgttcctaatcagttgaatcaggatacagctcagcaactattaaatactgcttttgaaaaattttctgttcatgctagtaatcaacaagacccaacagatttaaacacggtttttgaaaagggttctaataatgatgtttacaaggctttaaaagagagtatcaagcaaaaaatgatggtagatagtcgtaagccatctagctttaccattacttcggtcagtctcaatgacttacatcaaacaggtatgaaaacttatactttatcttatgctctcacttatgattattactacgatgaagcgactgatcaagaaaagaaaacgtcaggtcatttattacaaaatattacgggacagattcaagttaaaaaaacagagactggctataccattcgtaaatctattagtggtccgacagttgtcagtgaagacaatcaggtgaaaagtccgatgccattaccagaagaattaataggaacttgggaaacgaagcaggatgataagaccattaccatgaccttctcagaagatggtacagtaatcaaaaaaacggattacaaggatgataaaaaggaagatacgactaagacagcaaaagttgaaaaaacagaaaagacttcagatggtacttatcgctattactatcaatcaggagatcgtgctgcttttaccgttttagatgatatcggtgctaatgatcaatacacttatggtgttaagattaatggctccagtataacgactgtctattgggaatcaggcgatactagtggcagtcctaaaacaggcattagcttaactaagaaataagtcagaaaaaaaggatttcctatttaggaagtcccttttcaaatgttgcagatggagcttcaaccttaattttttcaagtgtaagaggatgagtaaaggttaactggtgagcatgcagcatgagtctaccagctgtttgctgactgtataggggatcgccaacaatggcatgatcatgataggctagatggacacggatttggtgggttcgtcctgtttgaagttggcatttgatcaggctggtattattgggaaaatgctttaagagtgaaacctgagtgatagctgtctggccatgcttatgatccacaactcgtttacgtcgatcatgacgatcgcgtccaattggctctctataaataattgcacgttcagaaaattgaccttgtgctaaagcccagtattcgcgtttgatagacttattttctaaaagacgattaaggatcggcaggataaatggattcttagcaaacatgacagtaccgctggttttcatatcaagtcgatgaacaacatagcaggtctgtccgacataagcagaaacatgattgagaagtgcgatttcattggggtcattagcatgtgttttcatgccttctattttattgacaataataagatgttcatcttggtagagacagtctattaaagtcttgtttcccataggaattttcttgataggatagtctgtgttatcaaagttcagctggataatatctccccgcctgacaagactttgccaattgacggcttgactattaactgtgacattcttttttattcttagaaagtgcctaatctttcttgggattaaaaaatgctcttctaatagttccttgacagtccctataggatatgggtttataatttttacagtaaaagtcatgattttattatatcattttctttaaaattgatataataaggtcatgagtatattagaactgttaaaaaagaaattttttccaaataaaaatattgatcatcaagactccaaagaggttgaaaatgggatgcctcaaaatcttgataatcaagctagccaagcctctgacaaccattatcaccgtcgttatgcacaggaagaggctagtaaattcagcaacattttgagcaagataggtctttctaaaaatggtttggttagaagatattggcgccgttatcatgtcggtaagattttgctgattgcggtaggtatttttgtgcttttgacaggctcttacctgttttatctagctaagacaaccaaagtttctgatttaaaacaggctttgaaggcaacaacggtcatttatgataaaaatgaaaaacaagctggaactctttatgggcaaaaggggacttatgttgaacttgatgctatttccgacgatttagagaatgcagtgatttcaacagaagacagaagcttctataaaaatagtggcatcaattacaagcggatgcttttagcgatagttaccttaggttattcgggcggaggatctaccattacacagcaattggctaaaaatgcctttttaacccaagaacaaacagttaaaagaaaagcacgcgagtttttcctcgctctggaattgaccaaaaaatatagtaaaaaagaaattttaaccatgtatcttaacaatgcctactttggtaatggtgtttggggggtcgaagatgctagtcaaaagtattttggaacttctgctagtcggctgacacttgatgaggcagctactttggcaggtatgttgaagggtccgggcatctacaatccactgtattctattgagaatgcgaccagtcgacgcgatactgtcctgcaaaatatggtggctgcggggaaaatatcgcagaagcaggccaatgaggctaaaaaagtgggaatggggaaccgtataagtgatacttatgttgctaagacagatgattatcaatatccatcttattttgatgctgttattagtgaggctagctctgtctatggtatcagtgaaaaagacattgttaacaatggttataggatttacactgaattagaccagaattaccaaactggcatgcagcaaacctttgatgaggaaagtctctttcctgtatccacttatgataataccagtgctcaagctgctagtgtggctttggatcctaaaacaggtggtgttagaggcttagttggacgtgttaatagcacaaaaaatgttacttttagaaattataactatgcgactcagtctaatagaagtccgggttcaacgattaaaccactagctgtttatactcccgcaatcgcttcaggctggtctatggataaactattacccaatacttcccgtgattttgatggttacaaacccaataactatggaaatattgaaacagaagacattcctatgtatcaggcactagccaattcctataacatacctgctgtttatacgcttgataaattgggtatcaataaagcgttctcttatggtaaaaggttcggtcttaatatggatgctgctaaaaaagaattaggtgttgctttgggaggaagcgtcacaactaatccacttgagatggctcaggcttatgcaacatttgctaatggaggcgtgatgccaactgctcacttgattagtcgtattgaaactgccagcggtgaaattttgaaaaaattcacacctaatgataaacgtgttatcagtaaatctgtggcagacaaaatgactagtatgatgttaggaactttttctaacgggactggtgtcaatgccaatgcttatggttatactttagccggtaagacaggaacaactgaaacaaattttgatgccaaccttgccagtgaccagtgggtgattggttatacacctgatgtggttattagtcaatggttaggttttaataagactgatgagaatcactatttgaatgattctagttcaggaacggcttccaatatctttagcactcaggcaagttacattttaccctatactaaaggaacagaatttaaggttaaaaatgcttatttccaagacggcattaaatctacctatgattcagatgatacttcggatgaaactaattctaattcccaaaatatcattgatggtattcgtgagaaagctcaaaatgctacggattctattaagaaaaaagtggatgattcaaatattattgataaggccaagaaagtttgggatagtgttgtgaattattttgaataacttgcaagaataagaaaaccatgttaaaatgaaaaagttatggaggcattatggcgcagaaaaaagcaagtctagcttgtgtagaatgcggctcacggaattattctatcggcgtgagtggtaatcctaaaccaaatcgactagaggttaataaattttgtaaatattgtaaaaaatataccttgcataaggaaacacgttaggagaaaaaacaatgaaattcatcggtggcgttttttcagttctaaagcatacgacatggccaacacgtaaacaatcttggcatgattttatttcaattctggagtattcagcattctttgctcttgtcatctttatttttgataagctgttaactctgggattggctgaattattaaaacgtttttaaaagcaaaaaacagctggaaaaggctgttttttatgaagaaatttgtttatttaataaaaaagactaggggttcttaagcttttatgatataataatgtacgaaaatttccaaaagccatctaggcttttttataatacaaaaatggaggtaaatcatggattcatttgataaaggatggtttgtgctgcaaacttattctggctatgaaaataaagtaaaggaaaatctgttgcaacgggcacaaacttataatatgttggataatattttacgcgtagaaattccaacacagactgttaatgtcgaaaaaaacggcaagactaaagaagttgaagaaaatcgcttcccaggctatgttttggtcgagatggttatgacagatgaggcttggtttgttgtgcgtaacacaccaaacgttactggttttgtcggctcacacggtaatcgttctaaaccaactccgcttcttgaagaagaaattcgttccattctcttgtctatgggacaaacagttgacattattgatactaacatcaaagaaggagatgtagtgcaaattattgatggtgcctttgtaggtcaagagggtcgtgttgttgaaattgaaaataataaggttaaaattatgattaatatgtttggagcagaaactcaagctgaacttgaactgtatcaaattgcagaactataaaaaacttttggggcttgtattctgaaccccatgttacatgtcagcgcctaatcaacgagaaaatgtgaaataaaggcagaacagctggtattatcagtctgacaacctatcgttttacttgttgaaggatatagggtataaagagtcaattatcaattggaagaaacaaaaaggtctcgggatagtgttaccaagagacctttttcatgttatatgtcataaaattttcttttttttggcactggtatcaagagtgacttcaatatcagggttgtaagtcatgatactattgataagtcctatgtcattcatttctggttttaagtctaaatgatattccatttgaatggtgttgtttttgttaatgtttttaacagaaatgagatttatttcacggcaagttttgtttaggattttttccagaatagggatataatcaatctcattattaggaacaataaaagttgcctgtcgcctgcttgtgctgacctgtgaaaatcctgaattctcataaagccaaagcacaagggtcaaggtcaaggtaaacaggatggctaggacaagaaagcccatacctgttgcaataccaacagcagttgcaaagaaaatataaagaatttctttagcaccgcctgcagctgaacgaaaacgaatcagaccaaaagttcctgcaacagcgatactggttcctaaattaccattaacaagaaaaataatcatggaaatgagtacaggcaaggtagccaaggtaataatgaattctttagtatagatagtcttgtatttataaattttagccagtaacaatcctaaaagcaggctggttaagatagataaggcgaacatgctgggactaatagtaatatctcgatttgagaaaacactgttaaaaatctgattaagcaattgacgtaggctcctctctgatatcttcaggtgttagtccataagcctttaaataggcagtggtatactttgaaaaagattgtggaattagctggtgtttatggaatattttttccatccaagcaggaagcccatttttaactttgatttccataacgatttgattgttttttagaagtggataaccattaaaacccgaagtgagattaacattttcgtggcgataaataacattgcggtcaaaagtaacgcgaagtttaggattttcaattccccttagtgaaaagcgttcatagtgaatgaacatttttggtactagttttttataacgttctcgtaaaatagcaagctcatgattagctctgtcatcttgttttatgttattgtcaattattccttgctgaacataattgcaaagagacaaaggggtggacgtcagacggtatttataaccgatttcttgttcaccctgatattcttttttcttgatttctaaaaaagcttgacttttttgagtaggttttgggtcataggtacgcattctaattttttcactggcatggcggtggttgattgaatccttaatcaattgaaagtcgggattatcaaaataaatattagtaatggaggaatgagtgaagcgatccggagtaagataatctttaaattctttttgtaattgttcaaaggtgtcagcttcaattaaatatttgatttcttttctttggaattctttttggatagtttcatttaacatgatagtccttctttctgcatttgtcttgtagattatacttaaaatatggcattattctcttatcttaagatttttgtagagggatagtcagtaaagaattgggatgccgcattattaagcatatagatattattacgcttgtaaaatatctttgtgctattctacacttgtctttttttcttgtcaattcctaagtctaaactaaagtattttttccaaaaagtatgccctttaaaatgtaggcagcttgtaattatcatttggagtaggtaagcttttttagtgagactcagtcagcagtcgctagatgctatttcctctgcaagtttcttatttgactctgttcattccttataaaaatgctataataataaagactatatttttatcggagaatattatggtttactacaatcacaaagcaattgagaataaatggcaaaaattctgggaagataaccatacttttaagactggaacggcttcctcaaaaccaaaattttatgcccttgatatgtttccttatccatctggagctggcctacacgttggacaccctgagggctatacagcgacagatattctcagtcgtttcaaacgtgcgcaaggctacaatgtccttcaccctatgggctgggatgcttttggtttacctgctgagcaatatgctatggacacgggtcatgatcctgctgactttacagcgcaaaatattgcgacctttaaacgccaaattaaatcacttggtttctcttatgattgggaccgtgaaatcaacacgacagatcctaactactataaatggactcagtggatttttaccaaactttatgaaaaaggtctggcttatgaagctgaagtgcctgtcaactgggttgaagaactagggacagctattgcaaatgaagaggtgctgccagacggaacttctgaacgcggtggttatcctgttgtccgtaaacctatgcgccaatggatgttgaaaatcacagcttatgctgaacgtctcttagaagatttggaagatctggactggcctgagtcaatcaaagatatgcaacgcaactggattggtaaatcaactggtgccaatgtaactttcaaagtcaaggacacagatgaggaatttaccgttttcaccactcgtcctgatacactctttggtgttacttatgctgttcttgctcctgagcatgatttggtagatattattactactgctggccaagcgcaagcagttgctgattataaacatcaagccagtctcaaatcagacttagctcgtacagaccttgccaaagaaaagactggtatttggacgggtgcctatgctatcaatcctgtcaatggcaaggagattccaatttggatagccgactacgtgcttgctagctacggaacaggtgctatcatggccgttccagctcatgacgaacgcgactgggaatttgctaaacagtttaatcttgatatcattcccgttcttaaaggtggaaatgtagcagaagcagcttatacagatgacggattgcatattaattctggtttcttaaacggccttgacaaggctgccgctattgacaagatggtgacttggcttgaaactgaaggtgtcggtaataagaaagtgacctatcgcttgcgtgactggctctttagccgccaacgatactggggtgagcctattccaattattcattgggaagatggaacgagtacagctcttcctgaaaatgaattgccacttgtcttaccagtaaccaaggacatcaaaccttcaggcacaggtgagtctccacttgccaacttgacagactggttggaagtgacgcgtgaagacggtgttaaaggtcgccgagaaaccaacactatgccgcagtgggcaggttctagctggtatttcctacgctatattgatccgcataatgaccaaaaattggccgatgaggatcttttgaaacaatggttgccagttgatatttatgttggcggcgctgaacatgccgttctccacttgctttatgcacgtttttggcataagtttctctatgatcttggtgttgtaccaaccaaagaacctttccaaaaactctttaaccaagggatgattttgggaaccagctatcgcgatcatcgtggtgctttagtagcaacagataaagttgaaaaacgtgatggttctttcttcaacatcgaaacagatgaagagttggaacaagcaccggctaagatgtccaaatcactcaaaaacgttgtcaatcctgacgatgttgtcgaacaatatggtgctgatacccttcgtgtttacgaaatgttcatggggccgcttgatgcttccattgcttggtctgaagaaggtcttgaaggcagccgtaaatttcttgaccgtgtctaccgtcttatcacaacaaaagaaatagctgccaaaaacaatggacacttagacaaggtttataatgaagtggttaaaaccgtaacagagcatcttgaagctatgcgctttaacacagctatttctcaattgatgatttttgtcaatgccgctaacaaggaagaacaactctttattgattatgctaagggatttatccagttattggcaccatttgcaccgcatttagctgaagagctttggcaagtattgacgcaatcaggtgaatctctctcttatgtcacttggccaagttatgatgaatccaaattggtcgaagacgaaatcgagattgtccttcaaatcaaaggaaaagttcgtgccaaggttgttgtttctaaggattccagccgtgaagatcttgaaaaaattgctcttgccaacgacaaaatccaagcagaaattgcaggaaaagatattgtaaaagttattgcagtgcctaacaaattggttaatatcgtgattaaatgagattcgaacttaaaaaatgaacactgttattttatgattttcaggaggattgggtgagatattcccatcctctttctttatgacgacaaggtaaaaacttagtcacactctttaaaaatcagacaataggttgttatactcaagtactgtctataatttgtcacctagtctaatctgagataaattcttaacaatgatattcgtgatagaattcttttatcaccgtgataggaattatataataggcaagtttttcaattagtgataagatagatataaccatatttttggaggaaaattatgaaattgaaacatattttaagaattggagcggttgcttttgcctcaattcttttgttaactgcttgcggatcaaaatcatctaaaaaaacagtaacccttgcgactgttggaacaacaaatccgttttcttatgagaaaaaaggaaaattaacgggatatgatatcgaggttgctaaggaagttttcaaagcttctgataaatatgatgtcaaatatcaaaaaacagaatggaccagtattttctctggtctagacagcgacaaatatcaaatcggggctaacaatatcagttatactaaagagcgtgccaataaatatctttattctaatccaacggcttccaatccattggtattagtggttccaaaagatagtgatattaagtcttataacgatattgctgggcatagcactcaagttgttcaaggaaatacaacagtgcctatgctgcagaaattcaataaaaaccatgaaaacaatcaagttaaactaaactttaccagtgaagatcttgcgcatcaaatccgtaatgtcagtgatggtaagtatgattttaaaatttttgaaaaaatttcagcagaaacgatcatcaaagagcaaggacttgataatttgaaagttattgatcttccttcagaccaaaaaccatatgtttactttatttttgcgcaagaccaaaaagacttacaaaagtttgtcaataaacgtctcaaaaaactttacgagaatggtacacttgaaaaattatcgaaaaaataccttggaggaagctatcttccagataaaaaagatatgaaataattcgttaaaatcaggttttcacctgattttttggaattgagaaaaccagtgttttaacgatatggctatagtttttagctataaggaaatctttgaaataacaatttgatagctctcattaaatatgagagaataggtttactttaatagaaaaggtggataaccgatgaaacttaaaaaaatattaggtcttttaggattggctttagctgcggcatttgttttaacggcttgcggtcaaaaaaatgataaaaatacgttaactgttggtgtgatgactatgactgattctgataaagaacgttgggataaaattgaggaactgcttaaaaaagaaaatatcaaacttaaatttaaagagtttacagattactcacagccgaataaagctttaaaaaacggtgaaattgacatcaattctttccagcattataatttcttgaataattggaataaggaaaacaagggggatttagttactgtagctgagacatatatcagtccgattaatcttttctcaggcacagaaaatggtaaagcaaaatacagtagtgctaaggaaattccagatggcggtcaaattgctattcctaatgatgctactaacgaaagccgcgctctttacgttcttcaagatgctggcttaattaaattaaatgtttctggtgatgaattggctaccgttaaaaatattaagtcaaatcccaaaaatcttgatattaaagaagtagatgccagtcaaacagctcgtaatttagcatccgttgatgctgctgttgttaataacagttacgctgttccagcaaaaattgatttcaaaacttctctttataaagaaaaagtgaatgaaggctctaaacaatggattaatatcattgcagctcaaaagaattggaaaaaatcaaagaaggcagcagcgattaagaaattgattaaagcttatcatacagatgctgttaaaaaagttattaaaaagactgctaaaggcgttgatgaacctgtttggtaagagtgggtaaagacaaataacaatgagtctgggagaaaagctacccagacttattttaagataatgacaattaagttaagaggtggaaaaactcatcagtgagtggttttttccttagctctgagatatgagagcgataaaattatataagataatggttttgtctcacctcttagtcatataaaaggagaaaaatggcattttcaagtgaacaagagcaaattgctaaattttggcaggatgaagttgctcagcattattttgaggttttacggaccttaatttccaaaaaatctatttttgcacaacagataggcctgcaggatgttgcaggctatttgggcgaaatttttgccaatgtcggtgctgaagtgacaattgatgaaacctatacggctccttttgttattgctaaatttaaaagttccaaacctcaggctaaaaccattattttttataaccattatgatacagtacctgcagataatgatcagatttggacagataatccctttaaactgactttaagaaaggggtatatgtatggccgcggtgttgatgatgacaaagggcatattacagctcgtttgacagctgttcgaaagtatattcgtgaggttggggaccttcctgttaatgttacttttataatagaaggagctgaagaatctgcttcaacagatcttgacaagtatttaaaaaaatatgcggatagtttgcttcctgcagatgttttgatttgggaacaaggtgttaaaaatagtcagggtcagttagaaattacaggtggtaataaaggtattattacttttaatctttctgtatccagtgcagaggttgatattcactcaaaatatggtgcggttattgaatcggcagcatggtatctcttaaatgcaatttccagtatgcgagcagatgatggtcagattttaatcgatggtatttatgatcaggtcttgaagcccaatgagcgtgaattggatttagtagagcgttatgctcttgaaaatagtgaaggtttgcgcaaagtttatggtttaaaattaccaactttaaaaaaagagcgtcgtgattttcttaaaacctatttttttgaacccgccttatccatagaaggactttcttctggttatcaagggcaaggtgtgaaaacaattctgccttctgctgccagtgctaagatggaaatgcgtttagttcccggtctcagtccccagtacgtttttgaaaagattaatagtcatttgagaaaattaggctttgaacatgttaaggtaacctataccttaggcgaagaatcttatcgcagtgatatgagtgctccggctattttgaccattattgacttggctaagcaattttatgaagctggcgtatctgttctgcccactgctgctggtacaggtcctatgcatacggtttatgatgctttgggcattcctatgttagcttttggacttggcaatcccaatagtcgcgatcacggtggtgatgaaaatgttaatttagcagactattatacccatattgaattaattaaggagttaattagaagttatgagtaaagcgattataaaacttgaccatattgatatcacttttcaccaaaagaagcgaactattgaagcggttaaaggtgtcacagtacatattaatcaaggtgatatttatggtattgttggttattctggcgccggtaagtccactcttgttcgtgtgattaatcttttgcagaccccaacaaaaggaaaaattacagtagatcaagatgtgatttttgaaaatggtgaaaagcggttatccagtcaggaactcagaaagaagcgtcatgaaattggtatgatttttcagcattttaatttaatggctcagaagactgcgcgccaaaatgttgcttttgccttgcgtcattccaatcttagtgcagcgcaaaaagaaagcaaagtaacagaattattagaattggtgggcttaactgatcgtgcagagaattacccttcacagctttctggcggtcaaaaacaacgtgtcgcgattgctcgagctcttgctaatgatcctaaaattctgatttcagatgaagctacttcggccttagatcccaaaacaaccaagcaaattttagcacttttacaagatttaaataaaaaattgggattgactgttgtcatgattactcatgagatgcaaattgttaaagatatttgcaatcgtgtggctgtcatgcaggaaggttctctaattgaagaaggatctgttttagatattttttcaaatcctagagaagacttaaccaaagacttcatcaaaacagcaacgggaattgaagaagctttgataaagattaaacagcaagaaatcgttaaaaacttgccagctaatgctgctttggtgcaattaaaatacgcgggtaaaaccacggatgagcctattttaaataacctttataaaaaatatcaagtcactgctaatattctgtatggcaatatagaaattttagaaaagacacctgttggtgagatgattgttattttagagggcgcagctactaatattgatcaagcacttaatgatttaacacattcagatttaacagtaacggttttaaagagaggagtttaaaatgcattttattcaaacctatttacccaatgcttatgagcttggtttgacaggagatgctggttggttaacagcaattctgaatacactttatatgactattgttccttttgttattggaggaggcgttggtctggtttttggtcttctcttagtattgatgggacctgaaggtgttattgaaaataaggttgtttgttggatcattgataaagtaacatctgttttccgcgccattccttttgttattttgattgctgtcttagcaccattaaccatgcttttgatgcaaacgaatttaggtgcgacagcagccttggttcctttatcttttgcgacttttcctttctttgcacggcaagtacaggttgtcttttctgaattggatcgcggtgttattgaggcagcacaagcttctggagctaccttttgggatattgtaaaggtctatctcagtgaaggttttccggatcttattcgtgtctcaacagtaaccttgatttctcttgttggtgaaacggctatggccggagcaatcggagctgggggacttgggaatgttgctatttcttacggctataatcgttttaataatgatgtcacttgggttgcaactttacttattcttttgcttatttttacaatccaatttattggagatacgctaactcgaaaagtaagtcatcgttaatacttaaggtaggaaaaattgagattacgattttgtttcttgtgaccttgcttgaggaggtgtttttttgaaaattagtcttttgcaattagatataaaagatggtcagtctcatgttaatcaggcaaacgtccaaaatcttttacaagaagcactcttagaagagccggatgtcattgttttaccagaattatggaacagtggttatgcgttggataaattagaaaaaattgctgatgaagatgggaaagtcagccgtccttggcttagtcaatttgctgagaaacatggagttactttagttgctggatctgtagcgactaaacgaaaaggccaattttacaatacagcttacagtttttcttcgaaaggacagctgataaatacttatgataaggtccatctttttggtctaatggctgaagataaatttttgactgctggacaaagagaaagtcattttcaaattggaactgttggtgccagccatgttatttgttacgatatccgctttcctgaatggattcgtcatttgatgagtcaagatgctgctcttttatttgtttcagcccagtggcccagcagccgcattgaacaatggaggatccttttacaagcgcgtgctattgaaaatcaggcctttgtcattgctgttaatcgtgtcggacaggggctcaaggaccagttcaacggtcattctttaatcattgatcctttgggaaaaattcttttagaggcaaatgattgtgaaggagtttttagtgctcagatagatctaaaccaagttaaaaaggttcgtggtcagattcctgtttttaaagatagacgtttggaactttattaaatgaagaaacagttataggtaataactatagctgtttctactcttttacagtctacaaaaaacaataatcttgtgataagataaataagaagtaaataagaaagaagggcaaaattattaaaaatgagtaataatttattagtcttgcagtcagattttggcttggttgatggtgctgtatctgcgatgattggtgtcgctttgcaagaagccccaacactcggtattcacaatttaactcatgaaataactccttacaacatttttgaagcttcttatcgtctctttcagacagttgaatattggcctcaaggaactacctttgtctcagtggttgatccgggagttggctcagacaggaaaagcgttgtggccttaacgtcaagaaatcagtatattgtgacgcctgataatgggactttatcttatatcaagaagcatgttggtatcaaagctgttcgtgagatttcagaaattgagaatcgtcgtcgtaatacagaattatcctacacttttcatggacgtgatgtctatgcctttacaggagccaaattggctagtgatcatatttcttttgaagaagttggtccagaattagctattgagtctatagtagaattaccagtggttgaaaccgttattgaagataatcttgttcgtggtgccgttgatattctggatgttcgttttggttctttatggacgtctattacacgtgaagaattttacacgcttaagccagaattcaatgatcgctttgaagtaactatctacaataatgatatgctcgtttatcaaaatcaagtgacctatggcaaatcatttgcagctgttcggattggtcaacccattatttatatcaattctctctatcgtgtgggcgttgctattaaccaaggttcttttgctaatgcctacaatgtcggtgtcggacctcagtggcgtatcgaaatcaaaaaattaaattaaggagaaaaaatgaaaaataattcaattaaagcagttgtcgcaacagggattggagcagccttatttgttattattggtatgtttatcaatattccactctttgctaatacaagtattcagctgcaatatgctgttcaagcctttttagctgttatttttggtccagttgtcggcttctttattggtttaatcggtcatatggtaaaagatatgtttgctggttatggtatttggtggtcatgggttattccaagcggccttgttggtcttggaattggttttttgagaaatcgtcttcatgttgaaaagggaatcttttcaactaaagatgttgttacctttaatattgttcaagtgctggtaaacgttcttgcttggggagttatcgcacctcttggcgatatcattatttttaaagagccagcaagcaaggtttttgttcaaggtttgttagctagtgttgccaatgctctaacagttggtgttggcgctaccattcttttggctatttatgcaaaaagtcggacacaagcaggaagtttatcaaaagattaacctctagaagattaggaaaatcatttttatgaaaccatttattgaattcaaggatttttcttttaaatatgatgctcaggcagagccaaccttgaaagaaatcacactttctattgagaaaggggaaaaggtactgattattgggccgtctggaagtggaaagtcaaccatagggcactgtttaaatggcattattcctaatatttataaagggcaggctgaaggttctttgacaatagatggcaaggatgtctttgatctatctatttatgaaaaatctcatcttgtttcaactgttttacaagatccagatgggcaatttattggcttaacagtagcagaagatcttgcttttgccttggaaaatgattgtgtagcccatgagacaatgtttgagagggtggacacttgggcagacaaattagatttaaaagaattgctccaacatcgtccgcaggatttatcaggcggacaaaagcaaagagtcagtttggcaggtgttatgattgatgaaagtcctgttttattatttgacgaacctttagctaatctagatccaaaatctggtcaggacaccatagatttgattgatcatcttcatcagacggcagaaacaactactattattattgaacatcgcttagaagatgttctttatcgacctgttgatcgggttatactgattaatgaaggtcaagttctttttaacggaagtcctaatgatcttttaaagactagtcttttacaagaaaatggtattcgtgagcccctttatgtgactgttttacgtcatcttggtttggatatcaaaaatacttctcatttagccaatcttgaacaacttgatctctctggtgtcagttttgcaggcgatatttccctaaaagaacctcaagagccacaagtcttgtttgatattcaacaccttaattttgcctatagttcagagcgtcccattttgaagaatctctcttttacccttaataagggggaacgtcttgctattgttggcaaaaatggtgcaggtaaatcaacgctggccaaagctctttgtcagtttatttcctacgctggccaaatcttttatcaaggccaggatattgcatctgattctatcaaggaacgctccgagcgtattggctatgttctccaaaatcctaatcaaatgattagtcaaacgatgatttttgatgaagttgctctgggactccgtttacgcggtgttgatgacagtcagatcgaaaagcgcgttttgaaggttttaaagacctgcggtctttatgagtttcgcaagtggcccatttcagccctttccttcgggcagaaaaaacgcgtgaccattgcttctattttggtattgaatccagaggtgattcttttagatgaaccgacagcaggacaagataagaagcattatacagaaatgatgtctttcttaaatgatttgcatgctttggggcatactattattatgattacacatgatatgcaactcatgttagaatattctgatcgagccttggttattagtgatggtcaaattctagctgatcaaagtcccattactctctttaatcaaccggacatactaagaatagccaatcttaaacaaactagcatttttgatttggcgcaaagactgaattgtgacccaattgctctgacacattactatattgatcagcaaggaggagaagatgaataaacccttaattggctatcatgatggtcaaggttttctctacaagctatcaggtgctagtaaactacttttctttctccttgtttctattgcttgtatgacaacctatgatacgcgtttaattgcagcagtaggtatcctttcaatctttctctttaaaatggcagacattcattggcgggacatttcttttgtcatgaaattcataaccgtatttgcggttttgaatgttgtcatggtttatctttttgcacctgattatggagaaaaaatttatggagcaaagaccttattatttgaaggatttggtggattttacttaagcagtcaggaaatcttttatcttttaaatttagttctcaagtatttctgtacagtccctctggctattttatttttgatgacgactcatcctagtcaatttgcttccagtctcaatcaaattggggttccttataaaatagcctacgctgttagtttaacgttgcgttatattcctgatgttcaggaagaattttatatgattcgaacttcacaggaagcgcgtggattggaattatcaaaaaaggccagattaatgagtcgtattaaagggaatgttcaaattattgttccgctcattttcagctccttggatagaatagataccatttccactgccatggaacttcgtcgttttggcaaaaacaagaagagaacttggtatacttatcagccttttagaaaaaatgactttcttactatatttctagcctgtttgattttactaatcagtctaagtttatttgctcttaataaaggacgattttataacccatgggcaggttaagtgtgagaaaacactctcctttcaatagaaaaaacaaaaaagatgattcatgtgagtgactttatcaaagttgatttttacgatctaactttgggaggtcagtccattaatcgtctttttaaaaatccatttatataatcaaaaagctctataattccaagtggattatcccactatagacattctagagcctttttatttaagaaattcattacaataagaactacaaaggttttttgttaggcattccagccttacgtggatatttattcggtgtttctttctttttagtgataatagtgagattgcgtccgtctccattgggaagttgatagttgtcactgctagttgtttgactaaacaataagtttaaagcattttgagcagtttttaattcttcgtcagcagcactggctttaagagcaagcaattgaccgccgacttttaaaaagggaatagtgagttcggataacacttgtaaacgagcgacagctctggccgtaacaaggtcaaagtgagctcgaaaattcttgtcttgtccaaaaacttcagccctgccatggtaaaaatgaaccttgtcaagttctaaagcatcagctaataaattaagaaatttaatacgcttattcagtgagtcaatgatagtgacgtctaactggggataaataattttcattggtagactaggaaaaccagctcctgccccaatgtccaaaagttttaaagactcattaggaatatagcctgataaaagtggtgctatagagtcatagaaatgtttaagatagacttctttttcctcagtaatggcagtaagattgattttatcattccattccaccaataatttaaaataaaggtcaaattgttctttttgtttagcagataagttgatgtgatgtttggccaaagcttggtaaaattcttcaggggtcatgatttctcctttatattatcacttattctaacataaatcttctttttctgatataatagtaagaagaatttttaaggagaataatacatgttgatttggattattttagttattgtcatccttcttgtgatttgggtgactgtcggttataatggccttgtaagaagccgtatgcaaacgcaagaggcttggagtcagattgatgttcagttgaaacgccgcaatgatttgattcctaatttgcttgaaacagtcaaaggttatgctaagtatgaacaaagcactttagaaaaagtaaccgaactgcgcagtaaggtagccaatgccagtacgcctaatgaagctatgaaagctagtgatgctctcggaaaacaaatggctagtattttagcagttgcagaaagttatcctgatctcaaagcaaatcaaaattttcttaagttgcaagaagaactgacaaatacagaaaataaaatttcttattcacgtcaacttttcaattcaaccacagctaactacaatgttaagttagaaacctttccaagtaatcttattgctggtttatttggttttaaggctaaggaatttttagaaacaccagaagaagaaaaatcagtgccaaaagtggactttggagatatggcttaggagtgtattatgctatttaatcaaattgctagcaataaaagaaaaacaatcgttcttctgattgttttctttatgcttttagctgctattggtgcggcagtcggttatctctggttggatagtttggtaggcggcatggctattgctttgattatcggctttatttatgcctttagtatgatttttcagtcaaccaatattgtcatggccatgaataatgccaaagaaattacagtagatgaaatgccagactattatcatattgttgaggatatggctatggtggcacaaatccctatgccccgtgtttatgtgattgacgatccttcgctcaatgcttttgctacaggatccagtccccaaaatgctgcagtggctgcaaccactggactcttagctattatgaatcgtgaagaattagaaggcgttattgggcatgaggttagtcatatcaggaattatgacattcgaatttcaactattgctgttgctcttgctagtgctgtcaccttgatttcgagtataggcggtcgaatgatgtggtttggtggcggcaggagccgccgttcaaatgataatgaaggcggcggttacctacaaattatccttcttattttttctcttctggccattatcttagctcctttggcagccagtcttgttcaattagctatttcacgtcagcgagaatatttggcagatgccagttctgttgaactaacacgcaatccgcaaggaatgattagggctctgcaaaaattagaacagtctcagcccatggctcactctgttgataatgccagtgctgcgctatatatcaatgatcctaagaaaaaatcgggtttaaagcaccttttttatactcatccgccaattgctgatagaattagacgtttagaacaagtgtagagagaaatcggtgttcaaaatcggggactctataagtttttaactttagatgcgaaggtttctcatgttagggttttcactaaagctttatcgttaaacaaactggaaacaattgcttccagtttgtttcttcttgttaatcaactgattttaaagcctctaacatatcaatttttctaatgtgtcgattcataataatcataacaataaaagtaaagaagaaaacagctccagatgatataaggatattagtccaagtgataccggggattgacatgacatattcaggaggaataacagtcataacgtatttatgaatgaagtaacctagagctaaaccagataaaataccgatagctgtcagaaggaaggtctctttaaagatatacatgagagcttctttttgataaaagcccaaaactttgatggttgctaattccttttcccgctcagcgacattgatacttgttagagtataaagaacgataaaagctagcataatagaaacaaaaataataattaagataatgttagttaagccatttaggaaatcactgattgtttgacgaaggactttgcttttaacgatagttagactcgctttgtttttattgattttttctgctaggttttggttttcaatattctttttggttctaatcaaataagcattgttttcgtacttttcatgaaagactttttcatggtaacttggtttcatgtaaatcatatggccaacataatttgttgtaaagcctgcgactttaatatgatacgattttccttcactatttttgacagtcagtttgtcacctacttttaaatggaaggcatgtgctaatttttgtgacaagatagcaccgtctgcagttggctctttatctaacttgatatagtctttaaagttattagcagtgaaagcttggatagattggctatcaagaagctctttggatttggcgtaaaaggtctcatagccgatagcaagttcatgattggcatcgttcttaataatcttttggtaagaagccacattagaagaaccaggattgtaaactgcaatcatgtcataagctgaaatatgctcgtattggctggggacaagttctatcaaactatccctgatgccgattcctaaaatcagtagggaaatagaccccataacaccaaaaatagtcataaacatacgcgatttataacgaaaggcattacgaagtgtcactttatttgagaaggaaagttttttccaaataaaggtaaggcgttccagaaaaattttgttggtgattgctggtggtttagctagcataagactacttggtttttccttgagttcttgtctggctgcccagtaggctgcaaagagcgtactcacaagagaaagagccagtgaaattagaagaagagggatgttatagacaaaggttatgttacctagctgataagaaccatcggcaaaaatattgtagatcctgcttggtaggaagaaggttcctaataaactcccaaagaatgtacccaaaatagctgttgctgtgctatagaggatgtactcccgcatgacctcttttctagtaaaaccaagagctcgcaatgtccccaattcaatacgtttttctgttaccatgcgtctcatggtggtaaaggataccataagcgaaatagcaaagaaaataacgggaagtacgagtgccaaggcatccattcgtgttgccgaactgccgtaatcagagtaaccatgagcaaactgagagcgttcttgaacagtaatgcttaaaaggctaacttgtttttttgccttcttcaagtttatttttttctgagctaaatctgtcttaagcttttttaatttatccttttcttgttgaagctgagcgttttgattagctatttgaagttgagcttgataagaagttgcagtttgggcagttacattgagttgaacctcattttctttaagctgaagttctttttgtttgagcgttacctcagccattttaaggttttcttctttttttgaaatatctgctaaagcttgttcttgattctttttagtcagcttttgcgtgacccgttccaatttttcgatattttcagagacagtatctgaatagtttttggtataggcttttttgtatttggtatttttaaaagtagcacgtgcaagattgtctgaaatagtaaaattggagtcaggcataacagcaaagtaacttaaggttccatcggcaacatttgtttgtcctaacttagttttagacataaattcagatgtacggactataccaacaattttcactttttttatcttcaaatcgttcgttttaagcgtaatgtactcaccaatgtttttatggaactgttcgccaatggcgatctcatcattagagtttgctagccgtcctttgataacttttaaagttgagatatttttaggattgctgatgatatgaatacccttgtcagccagttcagcatcagtttgcttgccataggaaattgcacgaataccatggatatgattgagtgtctttttatcagcatcggtaaatttatcactggctataacctgaacatcagctaaattttcttttttaaattgcctaatgacggtttgccgcatatcaggcccagctgagaagagtccaacaaaaacaaaaatagcaagaccaatcaataagcttaccgataaaaagcgtgcccaagtccgtctaaatgtacggaaaatattttttgttaatgttttcatattaccactccaaatctttaataggaattggcttctcattgtaataatctgccttgatttgcccgtcagatacttcaagaacatgatcagccatcggcttgatcattgaattatgagtcacaataataacatttttctcagttgtacggacgtattcttgaaagagttgtaaaatctgcttacctgttttataatccaaggcaccagttggctcatctgctaatagtaatttaggattcttggccattgcccgagcaatggaaacacgctgctgttcaccaccggacaattgtgctggaaagttgtttgttcgtttggcaaggccgacattgtctaagacgtccttcggatcaaggacatctttaacaacttcgctggctagttcaacgttttcaagagctgttaaattgggaactaaattataaaattgaaatacaaaaccaacatccaagcggcgataagttgtaagttctttttctgataagtctgttaaatttttctctcctatctgaacttgtccgcgagtcgcttgatccataccgcctaaaatgttgagcagggttgattttccagcaccgctgttaccaacgataatcgttaattccccctttttaatagtaaagttgattttattattggcacggacctcgtcttctttattttcattgtatattttataaacatcttttaagctaataaggtttgacatttctttctcctttatgttaatttattgatgcagtagattatactatacagtataccaatttcaatgaacaaaaaataaacattctgtttatttggcaagaggttaatatgtctagttatgaaaccaaaaaagaaaatactaaatcttatcttctggaggccttagtggatcttttaaaagagacgccattgagtcaactgaccgtgtctgctctaactcgaaaggcgggagtttctagaggaacattttacctgcattatttggatataaacgattttattaagacaattgaagagaacttatttttagtcattgaagaaaatttgcaagatgaccttttttatgacagtggtttaagtaaacttcgttatctcattgcttatgttgaaaaaaattatgctatctttcaaattttaatcggaaaaaacggagacaaaaattttgaacaacgtttgattgatctcatcaaacaatttattgttggaaatattgataaaaataatcaacatttcaatattcctaaagattatattttagatttgttgacgatgagtgttgtttctattatctatacttggtttgatgaagaaactccacggacaagtcaagagattattgatataataattaaaacgcgttttttatcaccagtagaattaataggagaaaaagtcaatgtttaatgttattgatataaaaaagcaggcacaaggtatttcctttaatgaaaaattagccattgagagggctgtgcaacagcgaaatccagatgtattggccctcagagaagtctctgctaaaggaaaagtgacttatgatgatgacttttatttgttaaactacgagttaacctacatcatcacgttaccttctagccgttctatgaaacctgttgaacaaaagaaaattttttccattaatgaagtttttgtcgaaaacagtcaactagaagccaaaaaagattttatggatgaggatctttttttaatcttagaagatgatgggattgatcttaaagaaagtgttattgataatattttacttaacattcctctaagagttttgacaaaagaagaggaacaggaacaaagtttaccttctggtcaaaattggagtcttcttagtgaagagcaatatcaaaatttacaaaaaggaaagaaagaaaagagcagcccttttgcagctttggaaggtctatttgatgagaaatagaccttctttttatatgatgttagaaaatagcttcaaagattcaaattgttcgataaatcaaatttttttcttagaaaaagtatagaaagatgtcctctacccattgaaaaatggaactagaaatagtataatgaaaaaactgatgggttattttgaaaaataaaatacctaaaagattttaatagattttgttttttccttagtaacgtaaggagtttcccattataataataaaaaaacaatgatgttatagaactgtaataagtttgttgcttagaatttatagtttgattataaaagttttatttaattaaagaaatattatagagattgttagagttttgttgaggagtatatggctaaggacattttaattattgaagatgaaaaaaaacttgcaaagtttgtttctttagaattacaacatgaaggatatgaggttgaagtgacatatgatgggcgttctggcctggaaagagcacttgaaaaagatttcgatctcatccttcttgatttaatgttaccagagatggacgggtatgaagtgattcgtcgtttacaattggaaaagacaacttatgttattattatcactgctcgtgactccattatggatattgtgactggtcttgatcgtggagcagatggttatatcgttaaaccatttgctattgaagaattactagctcgtgttcgtgccatatttcgtcgtcaagatattgagaaagctaagcattcttctaaaaatgatactacctatcgtgatttgaaattagatgttcataaccgagctgccattagaaatggtgagacaattcctttaactaaacgtgaatttgatttattaaatgctcttgtagaaaatatcaatcaagttatgactagagaagagcttttggcccgtgtttggaagtatgatcaagaagctgagactaatgttgtcgatgtttatattcgctatcttcgtgggaagattgatgttcctggtaaagaaagctatattcagactgtccgcggcatggggtatatcattcgcgaaaataattaaatgtctaggtctgttgaagtggttcaactgctattttaaataggggttaacttttgtttcagtcttaaaaatagttcaacaagttaagtctgctctggattgtttgaataaaacagttacaactatgacaggcgataagattagaaattggacctcataggtatcatttaaaatgaatgattaagcaacggttttaaccgttgcttaagtttttaattccaatagggcatagaagactatatgaattcacgattagctacgttttctcacctcggtcaaaatataaaggctcattccattttcttttgttataatgaaaaatatggtaaaataaagtattaattgagtcttagaactgaggtgttttcatgcgttgtccaaaatgtaattatctaaaatccagtgttgttgatagccgtcaagctgaggaaggaaacaccattagacgccgtcgggaatgtgaaaattgtcatacacgctttacaacttttgaaagaatcgaggaattaccgcttttagttgttaaaaaagatggtaccagagagcaattttctcgtgacaaaattttcaatggtattattagaagtgctcaaaaacgtccagtatctagcagtgctattgaaaaagttgtcaatgatattgaacaaaaaattcgcagtgattatgatagtgaagtatctagcgttgttattgggaatttagttatggatgagttggcagaacttgatgaaatcacctatgttcgttttgccagtgtttaccgtagtttcaaagatgttgatgagattgaagctcttttgcagcaaatcacaaatcgtgtaagaagtaagaaaaagagaaaagcagatgaaaccaattgatgaatttctctatgtcaagcaaaattatttgacttctgatacaaatagtttgatgcgcctttattttccgattattggcagtgatgctgctgggctttatcaatattttgtcagtttttttgataacggtgaaaagaagcacaaatttagtgagattctcaatcatactcaatttggaatggcttgttttgagaatgccttatctgtactgacggctatggatttgttagttttttatcgacaagaaaatctttattatattaaactaaaagctcctttaaatgcagaaacttttctaaaaaatgctgtctatcgccatcttttagaacaaaaaattggacaagttgcagttgaacatttggatttacatcttccccgagaagcccaagacctttctaaacaattttctgaagtttttactgctgcaggtcaactcgatttaaaaacacccaagagtaagacggattttgacttagatcattttaaggatttaatgatacgagataacttgcaatttactgatgaacaaacagatgttattgcgttgtacatcctttctgagaaatatcagcttacttggtatgagacctatcttttagctaaagagactgctagcaattatagaatttctctgaaacgtatgcaagctaaacaagaacaaagggatcatgttgatgcagataactctttttctaaaaaggaacaaattattatagaagaggctaaagctgacaaagtagaagttttccttgctaaaataaaaaaaacaaggcatgctgctattacaaaggatgaacgcagcttgttagcagagcttgcagagatgggctttttggatgaggttatcaatattatgctgctgtatactcttgataaaacaaatacagctaatattaacaagacttatatcatgaaaattgcgaatgattttgcttttcaaaagatagacagtgcagaaaaggcagtacttaaactacgtagctttgccgaacgtaaaacaaagcaaaatcaaaaaaaaataaaagaaagctcaaaaaacaatgttcctgaatggagcaatcaagactatcaaaataatacaactgcagatgagcaggctcgtttagacgagattaaacgcaaaactttagcaagattgagaagggatggtgagtaagtggaaacaattggacagacattggctaaaaaagataaccataagtatgatacagaaaaaatgactcaagccattttatcagatcaggaaattgctaatttcattgctgctcaccatctgtcgaaagaacaaattaaaattagtttacctaaattcaatcaatatcgtttagagcgtactcgctttgaaaatcatgatcaggcctatattgccaagggctatcagccgcttcttgtgatgaatgaaggttatgcagatgtcgcctataaagagacaaaagaactgattgctgcaaagaggactcaagcgatttctgaccggattaatgtggttagtttaccaagatcttataagaacatctcctttgatgatattaatcttgatgatgtcaagcgactagatgtttttaaaagggtagctgattttgtggagcagtatccgaatcctgagcaaaaaggactttatctttatggtgatatgggaattggtaagtcttacctcatggcagccatggctcatgaattgtcagaacaaagaggagctgcaacgacactgctgcattttccgagttttacgattgatgtcaagaatgccatcaacacaggaacggttaaggaagaaattgatgctgtcaagacggctgatattctgattcttgacgatattggtgctgaacaaagcacttcttggattcgtgatgaagttctgcaggttattttacaatatcggatgttagaagaattgccaaccttttttacctctaattatagttttaaggatttagaggcgaaattagcgaatataaaagggagtgatgaaacttggcaggctaagcgtgtgatggagcgtattcgttatttagcaaaagaaattcaccttgaaggtgaaaatagaagataagaaggagaaataatggctttaccaacagttgctattgtcggacgcccaaatgtcggcaaatcagcgctttttaatcgtatagctggtgagcgtatttccatcgttgaggatgttgaaggagtaacaagagatcgcatttatacaaaggcggaatggcttaatcgccaattttcaatcattgatacgggcggtattgacgatgttgatgccccctttatggaacaaattaagcatcaagctgatattgctatgacagaggctgatgtgattgtttttgtggtatctgctaaggaaggtatcacagatgccgatgaatatgtagcaaagattctttatcggacacacaagccggttattttagctgttaataaagttgataatcctgagatgcgcagtgctatttatgatttctatgccttgggactgggggatccttaccctgtttcttctgctcatggtattggtacaggagatgtccttgatgctatcgttgataatttaccagcagaggcgcaagaagagagttcagacattattaagtttagtttgatcggacgccccaatgttggtaaatccagtttaatcaatgctatcttaggagaagatcgtgttatagcatcaccagtagctggtacgacccgtgatgcgattgatacaaccttcacggatgaggaaggccaagaatttaccatgattgacacagctgggatgcgtaagtcaggtaaagtttatgaaaatacagagaaatattctgttatgcgtgctatgcgtgcgattgatcgctcagatattgttttgatggtgttgaatgctgaggaaggtattcgtgaatacgacaagcgcattgctggttttgctcatgaggctgggaaagggattgttgtcgttgtgaataagtgggatgcgattaagaaagataatcgtactgttgcacaatgggaaacagatattcgtgacaattttcaatatatctcttatgctcccattgtttttgtgtcagcagttaccaaacaacgactgcataaactgccagacgtgattaaacaagtaagccaaagtcaaaatacccgtattccatcatctgttttaaatgatgttgtcatggatgctgtggcaatcaatcccacaccaacagataaaggaaaacgcctcaaaattttttatgcgacacaggtttcggtcaaaccgccaacctttgttatttttgttaatgaagaagagctgatgcatttttcttatttgcgttttttggaaaatcaaattcgccaagcttttgtttttgagggaacccctatccgcttgattgcaaggaaacggaaataaggtagtctttgctttcttacttttaggcttttaacaataaagcaagcatagataggttgtatggaaaggaaaaaatgtttgaaaatctaaaagcttatttgacacagcaaggttttaagtatattaaaccagaaaaggctggttccttggctgaagaaatgatagctttgaaaaccttaggacaatctgcgcgtgctgaatttacagagatagctaaggtgcttgctcttaaagtttctccttttgagatgatgcgtgtcagtaattgggctaatcaggcacaagttgccagaccgcatttttggtgctattataaacaacctgaagataaccaggacgatgttggacttgctatcaggctttatgggaattcagctaattttggtatttcagtagaggtcagttttattgaacgcaaaaaatcaaaggcgactctagctaaacagcataaagttttagacataccgattgctgaaccgctttattattttgctcaagagaaaagtgaaagtcatcgggtttcaggaacagaagcttatcgtcagatgttacggcaaaaagttgctgacggtcaagttcgaaaagttttggtcaagtatgacatacctatatcagagggatcagatctagttatactaactgatcaattggctcaaggctttgataaattgatgccatattatcaagcaactaaatcataggtatcaaacagcagtctaaagggatttaggattattagaaaaaaattatgttttttattgattttattttacatattgataactatatttatagtattgccaataccgttggcttgtggacttacctaattctatttttagtaatctttgtggaaacgggtgtcgtcattcttccttttctgccgggagacagcctcttatttgcagcaggtgccttagcagccaatcctaagatgcactttagtgttttagtttttggtattttatttttcatagctgcttttgttggagatacctgtaatttctttatcggtcgtacggctggttatcgtttggtgcatcacaaatttttcagtcaatttattaaagaagataatatcaaagatgctgagctttattttgaaaaatacggttcaacttctatcattttaggacgttatatcccgattatcagaacttttgttccttttgtagctggtcttagtcaattccctgtgccttcttttattaaacgcagttttatagctgctttgtcttggacagtgattgcagcaggagctggctatctttttggtaatattccttttgttaaaacacatttttctgctattatcttggccattgtttttgtgactttactaccaagtgctattactgtcgtcaaaaccagcaaaaagaaaaaataattatataatcaattgacaacggctgattaacagaaaaaaagcagtaatgctaatgctgttaatcagtcgttttttgccgtatagaatatgtagaagagttgaacatgatcaaagaaatcttctttaagattgatttgttatcttcaagggattaaggctatatctattgcttattacttttttgaaaatagcataggtgagtcaaagtggttaacggttttagagaactgtgatataatcgaacataatttacagcggttcatacttatagaagaaacttttctttttttgcggttagcaaaatgtttattatcactagaatgaacaaaaaatgcttaatcatctgattatattgcgaatagataagtagggttattaagttagtagattttattgagtgatatcgttttataccttttctgtgtatagtgttaatcagctaacctaaacagaagattaaaggagaaataatgatttctatttttgtattggaagatgattttttacaacaaggacgtcttgaaaccaccattgcagctatcatgaaagaaaaaaattggtcttataaagaattgactatttttggaaaaccacaacaacttattgacgctatccctgaaaagggcagtcaccagattttctttttggatattgaaatcaaaaaagaggaggactggaagtagccaatcagattagacagcataatcctagtgcggttattgtctttgtcacgacacattctgagtttatgcccctcacttttcagtatcaggtatctgctttggattttattgataaatctttgaatcctgaggagttctcccaccgcattgaattagcgctgtattatgctatggaaaacagtcagaagaatggtcaatcagaggaactttttattttccattcatctgaaactcagtttcaggtcccttttgctgagattctgtattttgaaacatcttcaacagcccataagctctgcctttatacttatgatgaacggattgaattctacggcagtatgactgacattgttaaaatggataagagactttttcagtgccatcgctcttttattgtcaatcctgccaatattacccgtattgatcggaaaaaacgcttggcctattttcgaaataataagtcttgtcttatttcacgaactaagttaacaaaactgagagctgtgattgctgatcaaaggagagcaaaatgaatgaagccttaatgatactttcaaatggtttattaacttatctaaccgttctatttctcttgtttctattttctaaggtaagtaatgtcactttatcgaaaaaggaattaacccttttttcgataagcaattttctgataatgattgctgttacgatggtaaatgtaaacctgttttatcctgcagagcctctttattttatagttttatcaatttatcttaatagacagaatagtctttctctaaatatattttatggtctgctgcctgttgccagttctgacttgtttaggcgggcaatcatattctttatcttggatggaaatcaaggaattgtaatggacagtagcattataaccacctatatgatcgagtttgcaggaatagcgctaagttacctctttctaagtgtgttcaatgttgatattggtcgacttaaagatagtttgaccaagatgaaggtcaaaaaacgcttgatcccaatgaatattactatgcttctatactaccttttaatacaggcattgtatattatagagagttataatgtgataccgactttaaaatttcgtaaatttgtcgttattgtctatcttattttatttttgattctgatctcatttttaagccaatataccaaacaaaaggttcaaaatgagataatggcacaaaaggaagctcagattcgaaatatcacccagtatagtcagcaaatagaatctctttacaaggatattcgaagtttccgccatgattatctgaatattttaactagcctcagattaggcattgaaaataaagatttagctagtattgaaaagatttaccatcaaatcttagaaaaaacaggacatcaattgcaggatacccgttataatatcggccatctagctaatattcaaaacgatgctgtcaagggtatcttgtcagcaaaaatcttagaagctcagaataaaaagattgctgtcaatgtagaagtctcaagtaaaatacaactgcctgagatggagttgcttgatttcattaccatactttctatcttgtgtgataatgccattgaggctgctttcgaatcattaaatcctgaaattcagttagccttttttaagaaaaatggcagtatagtctttatcattcagaattccaccaaagaaaaacaaatagatgtgagtaaaatttttaaagaaaactattccactaaaggctccaatcgcggtattggtttagcaaaggtgaatcatattcttgaacattatcccaaaaccagtttacaaacaagcagtcatcatcatttattcaagcaactcctaataataaaatagaggaggcctattctctaagagatagttttatcttctcatccacgacagcacacttgattatttaaccctgtatttttattttacatttaaaaaggctggaataataaatccagccttgttttattccaatgttagcctatcttattttcccaaagcttgtgtaaaacttctgttaaacagccggaaaaatgttgataggcttccgcttccgccaatgataatctctaattcatcagtcttaatttctttaaagtcattttttaatgatagtgtttttttcattttatatctcctttttttgattataattagtatactattttttatgaaaaaatcatggattttcttgaaaaagtaatattttccttaggacacataatgtaaaattagctggtaatgatagtttcagaacatcaaaaatgaccgtttaggacaaaatagctaccatttaggatattttgctccattttgaaaataaattgttatactagagatgtcggttgcgcagccagacaaaaaactaaaaatggggaaggggtatttatcatatgaatacacaagcatttgaacaatttaacgtaatggataatgaagcactttcagctgttgaaggtggggccgcggatggaattgtgcagcaggtattgctctaggtgctgggcaaggttatatggctactgcaggcggtacagcatttcttggtccatatgctattggcactggtgcctttggggctattgctggaggaatcggaggagctcttaattcctgtggttagtaatttaatttttaaggaggcagaaaaagatacaaatacggaaattttgatttttctcctccctttgtttattttacattgatggacaaactcatctgataagttatatttagaataaaggagaaaagaaatgtttaaaaaggaaagtcagaaacttaggttattaagacttttaacagcgcagctgatagctgtttgtctgttaattttggttttgacacaagctatttttaaatctcccctgcttgttcagatttgctttgtaattataacattttgtactgctggtctgaattattattttattaaggaaatcagagaggttaattcacaagaaagttcggctgctacaattactagtcaagttgtccttactgccgtttttttccttttgacggttttaagcagttataaaacaattcaagtaagcgaatttgccagcagaatcattttcttaattgccgctgtaatcagttttattatctctcttcttttattatggggaataaaatatgtaaaaaagacacagtagcgttcaaaaaaatctgataactaatcaaaaacatcattaaatctttccattatatacatggtaggctttttatactcttggtacttctgatagttagtcagtcaaattaaaactctgcaaaaaccaaaacagtaatttattaatttaactttacccatatttcagtactattaacagataaatctaggtcctaaaaaataaaatgatcaagttggattagtataaaacaattcttagcagaagtttctaaaacaaaaagagttctatattctagaaaatagtaaaagtaaactagaaggggataagaactaatatcattgtaacagaattaagcaacttttaaaaatgcgttcatatttatctgaaccagaagagtcttttccttttatgaaagttaatttatctgatctatgaagaaattgtctaaagaagttggacaaagaaaacttcatcctttatcttttatttttcagaggaggtcaatagaccgcatagaaaagcatgaaatcacttttatatttagaacagtaacttttaaaatgcagaagattgaaaaaggtaggtgaagattttctgttttataccagtcatttggtctagaaagataatattgctacaaatgcgtttaggtattagtgatagtgtagaggcataactagaggaaagaaggatctaatcatatggtgacctatgggagaacttgtgaatgatcagagcaaaattgattaataattgtattatactattggacgtagtgattattttagagatattaaaacaaaaaaaggaaaataaacaagaagagctataagataattctttggaatagtattattatatttgtttgggaatatgatggttgattggttttagaaataactggttaaacgaatttctaaagtttaagtaataagttcattattaaaaagtaagtctaagatctgctttttcttccatcatacatgtttttataacaatttatacattggctatgttacttgctccaataatgttagctcaaaaactttaaaacataagtagagggacttcaacaatgaaaaatattcatcaaaagtttatggaattgatttatttttaatgaattaattagaacctttatttataattcattaaataaatctgtggtgctagttaaaaaatcctaagttataaaagatggtttgatctaaccaaaattcatacctttttaaacctctcaccgatggtattttgataacaaaggctaattacgatttgcttggacgatcttcgtttgtttggtcacttacagtatgtatccaagtggactttttgttaactacaatctaacacccctacaagtatatcctgtacaagaagaaatagaataaagaaggtatgatgaaaaaaagtaaacaaaaagcaaaaattacttattctcgtgagaaaagaaaagtagcggttgctgtaacatgtatttttattggtcttattattatgaagggttatataagtatcaaaagaggaattcaatttgttgcttctaatcttacttttgtgtttatcttatttttctgtctactggccgaatggatttctaggaaaatgaaaaaagaggaccagtcggttaaagcggctcgcatctgtgaaaaaaggaagacggtaatcatttatacatttggattaatggttatggttattctgaatgtttatgcaagtattacaaaacaagctcattttatggatattaatcttattttgatgtttttaatagtccttggttcgttaatagattgggttattgaaaaaattaaaaagtaggtatttctattcacttagcttatcgcattatttttctaatgattacatgtcagattatcaattattcaagagttgaatgatttaatatggttaggttactgaagatatcatctttttatgtatgttacagatagaaaggtaagttaatgagattatcaaaatgcagttctagagtattacgttttcttaggttaggtgctgttctaagtggttttttggctcttgatctttgtttccatatgatagatagtaaaagttctatttggctctggcttccgcttggaatactgtctttattggttttcctagtagcttatcttgcctataaagaactaaaccaacgccctatagcagaacagcaatttactcagtatcaaactcaaaccgccgtgactatcttttcgtttttagttctattagtgtgctcttaccgagcaattacaactaatgatacggctcagcgcactgctttaattattgtaaatatactcttagttattgttatcatctggaatctaattgaactcattaaactgcataagagacgctaaacagtttttactttcaggcaatataatgctgaataggaacaattgttaaaaattattattaatgtaaagtaatcttcttgaagtatccactgattagagtttactttaattaattggactttcaggagtgtatcaatcatttcctgctttaattctggggataagtaaatgttatttccttttctaactctttcaagatcatatggatccataagttttaccatatatttgagattagacagactcacaccacacttttgattaagttgggaccacgacatcccattcttcctcagctcatatattttgagtttattttcgtacgttaatttcatcaaaaaacaccccaatcgttagattttctgtccaactttttgggtgcaggtcagaagatctgtaagataattctttggaatagcattattctattgtttggaatatgatgattgattggttttattctcgattttagaaataactgattaatctaacttctaaagtttaagtaacagaattgcttattaaaaagtaaatctacgctctataataaaaggagaacaatgaaatttttaagtcaatattattatttttaaatttgatattattactaatagagtagttctcctgcggtcgttgttaccgctatagcattagaatatacctcttgtaggtggtccatgaagaataattaatgaggcgatgatcggagcagcagctttctgcttttagtaaatttaattgaaaaattatagaaaatatgtttggaggtaagccatgaaaaagtatttagtagtaccttttgccttgataatcatatttttaggagttaaggttcttttgacttcaaataacatttggcagatgatgtttgcatctatcggtatgctattgtttttatttggcgtttttagagaatacagcaagataaaaacaaaataaggataagtacattttgttgataatactaaagattctgctaatcttacttttatttgggataaaagctttgctatcttctaaaactattttttgtctaagattcattttagtctttctttttatgtttatcattttaattttgaaagaagctaattaaagtagatgagaactaaaaagctttcgtttttcatagttatctaacttgatgcggtacaggcaaagttgctaatttgtcaggaagggtcaatttgtcaatttctaatagaaatttggcatttttaccgtttaggacaaaatagctaccgtttaggatattttgctacattttgaaaataaattgttatactaaagatgttggttgcacaactagacaatatttaaaatgaaaaaggggtgtttatcatatgaatacacacgtattggaacaatttgacgtcatggatagtcaagtaccttcagctattgaaggtgggggatgtagttggaaaggagccgataaagctggtttttcaggtggcgttggtggtctcattggtgcaggtggtaaccccgttggtggagtccttggaatagctggtggcttagatgcatacggtgaacttgttggaggtaattaatatgtctaatgtattatgccttttgattggcctagctattggtttagcttatagtctttggaagaaaaaatgaaaaaacggctctataatatctatagtaggtcaacccactttcgatattatagagcttatgctttatgtaaataattaaggggcgcttactatggaaaaacaatataataattttaaaatattaaatactgatgcattggaaaatattcaaggcggcggtcgagctcctaggtgtgctgcccttgtgggagcaagtatttatgatggcttagcagtagttggagatcctgttggagttgccatggcagccggtacaattgcagcgggaagtttttgttgataaaagttaaagtaatgagaactaaagtaggtttagctatttttatgatattagggatagttggaatttttcgcagtactgatatttttgtaagtttaaccttgatttgcgtagagttctatcttctgtatttattttttcgggattcttccaaatagcgataatatctatatttaaaattaaagaaatatccttgatttcttattacctttgcgacattttattttttatattgatacatcattaattcagcagctatcattaggaaaaattacatatgattagtagtaattgttttagaaatattaagacagaaacgaaaaataaaaggcctataaaataattctttggaatagtattattctattgtttgggaatatgataattaattgaacttttttgattctaggaaataacagattgagctagtttctaatatttaaagagtaaggctaaattctattataaaaggagaatggtaaacaatgaaatattataaaacactattattatgttcggcctcgctattattactagcagctggtgttgcttatgcagaggaggaaactcctcagggaatagaaaaaacggaagtgtctgcatctgcagtcacaacagaaactcaaagtgctgatgctactgttgttcaggaaacagtagcaccagcagcaacgactgcttcgacagttacttcttctgagaataagagcgaacgcagtgatgaaaatagtgttcgcgaaacttctttggagacatctgaccaagttatagaaaattctcagccgcctcaacaagaggtggataccagctcatcaactgaaaaaacatcagatagcaagaatacagtatcagaaggagtttccgttgaagaatacgaagcaaatgttgctaatttcaaagctgtcagtatggcagatgtttatcacatgtttgatgattcagagaacgattacattttgtatatcggtcgtcccacctgtcattactgtcgggatttttctccggttttaaaagaatttaatggtttaacaggttctcaactttattattataatacagatagggacgattttacggttgcagccaaggaatttctcactaaaaaagtaggtatgtttgctactccaactactttatatattgataaaggtcagttaatatctggttgggtaggtagcggtattacagcacaaaacctgtataacaagttatatagtcatacaatccagaaaaaagaatatgaatctgaaaataatgggatcgctcctgcagaagcaccaaatacagataaagagaataccaaagttactgacgagaaggttacagctgttccaggaagcggtgaacctgcacctaaccaaaaaagaggggaaacacctgatccaatagcgaaaaaatcagatttttctcaaacgatagctgataaaacaagtaaaaagtcactcacactcaataagattatcacacaaatattatcgcttattcgcgatgccttattaaagttaaacatttaaaaggttagatagacgtgacttattgcacggtacttgtcatgttggtatctgcagctaggactgtttatactgcctatgcctaaaacataggatattttactccacttcaaaaataaattgttatattgttattaaagatatcgattgtgcaattaggcaagaaactaaaaaatgaaaagggttttagaatagggaactattttctggtgttgaaggtggaagctgtgattggcaaagtgcagacgaatctggctttagtgataaattgagtgatatttctggaacttgttcatgaagatctcagattaggtgcatacaatatcattttatggtagtgattaagatgtctaatttactctatctttttattgatttgacatatgctatttgtcaagtattaaaatactttaatcctgtagtcgtcgtttactgatatcattactttactttatttaatttataaaaagtctgcattcatctgcaccttatttttcatagtaagctctattttgattctttgtgattaatcatgaagtctcgttaaatttgtgggaaacaagagaatgttctttctctgttagttttagagtcgtaagaaagaaaaggaagttgatctgtcttaaattttaattgtaaacttattagacttctattttactttaatttaaaaaaaaatgctctagatatttcaaatatattaaacatttatgctgaatcttaaattttcttgattttttcttaaaattacttaattatagtaactataaataaaaatttagatgatatgcttgccggtatagaagtagaaggcggagtcaattgggagcgtgtttttgctggtgctacggtttatggtgatgcaactatggctgtttgtatggctaccggtccaattggttggggagttggagctgcataccttgctacttgtgcagcttcaggtgcatacattatggtctggcaacctaacttaggcattggttaaattagtctacgttttgaggtggttatcgtgagaagaaaaagttcttttatcatttgtatagcaattatcatcatatcaaacattcttatgatgacagttattaacaatggtgaggagaaattatcaaatctatttgtaatagcgattgcattagtttgctttccaggctttttgtgggcaattgataatgagatgatttcacttatccgcattgaatcttctgcgctacttcttctcgctgtcctttctgccatgcgtttaatcaatagattgacaccttacctactatggtgaacttcacagtaattattgttgttttgggcttaataacagttaagactgttccaaataagtttcaaactgaagataaagtctacagaaaacatttgacacattttcaattgtagcagatggctaatctaacatctagagaggatcaagttggttctctctatttgtatgttcaaagcgaggagtcttttggtttcgaagtatctgtttttttaaggctcaaaaagtcacgcttggtgttttataaatatttagttatttaagtctgaagttagaatagcttttatcgaaactgtcaattatttctggaaatcttcataaagggaataataatttcggtgaataagtattgtttctttcttagtaaactaatagattctatttatttttaactaatttatttgaaagtttaataaacaatctataatttttcttctctttaacataaacattaattctaactttctttagactattggggtttacaagctattaaaaagtttctataatgtgcttgtcagatgagaaagctggcaataaaaagaaatggggtttatcttatgacaactcaaacattagaacactttgatgtattagatgcagatttgcttgctacagtagtaggtggtgttaatcaatgctttgcaggaacaactggtaaggttatagaaggagccctcgcaggtggcgcagcaggtgcaactatagctgctgctgtctctgcacctgttgcagaaggtggtggaatcggtcctgcagcaggtgcgggtattggtgctgttttaggtggtattagcaatggattatacggtgcgtcacaatattgtaattaatttattcactataaaaaaagaggaggtatcttatgacaactcaaacattagaacactttgatgtattagatgcagatttgcttgctaaggtacaaggtggcgattggcaatgtacgtcaggagttttgggtggtatggtgtatggcgctcttacaggggcaggagcaggagcagctataggtgctgctgtttctgctcctgctgcagaaggtggcggagtcggtcctgcagcaggggctttacttggtggaacctatggtgcaattggtggtatccttcaaggtgcaactgcttgtgaataaaactggcagatttggttgattctcaactgcagtactcgttaaacctttatttttgaatacaagaagaagttgcttgtacaattaaggtaaggacatctactatttacactaaatggtagatgtccttttttgtgtgttaaattatctttaaggagatgaccgtatattacatctaataacctaacgtctctcacatagcattcaggttattattactcatagaagagatttctttattcaaagaattattgggcgccaatctttctatttctaatgttgcttttgtcaaaaggcattatcagataaaaactgaggccttttatgccccttgtaaagagttcatctcttatatttaatttctacttacctataagtagccacaaatgggagtgatgtatgtataccacaaaatcctcataataagtagatagcaatcctataatttgattattgtttagcacgctaaaaaataaatcatctgaatgaactaatgttgctgatgttcattcagatgatgttttatatatagtattaaggattaacttaataagattgttgcaatcagttaaggaacaatcatctcagtgccacccatataaggacgaagtacttcaggaattgtcacggaaccatctgcattttgatagttttcaaggatagctgcgacggtacgtccaactgccagtcctgaaccgtttagggtgtgaagaagtttcaccttgccatcgacttcatcacggtaacgaatttgcgcacgacgtgcttggaaatcttctgtattggaacaagatgaaatttcacgataagtattttgtgcgggaatccagacttctaagtcataggtcttggcagccgaaaagcccatgtcgccagtacacaaggtaataacccgatatggcaattctaatttttgcaggatattttcagcattggctgtcattttttccaattcattataagaatcttctggtttggcaaatttgaccatttctactttatgaaattgatggaggcggataagtccacgcgtatcacgaccagcagaaccagcctccgaacgaaaagaagggctcatggctgtaaagtaaataggaagctctttaccatcgatgatttcaccgcggtagtagttggttaaaggcacttcagcagttggaatcaagacataatcattgtcagctaattcaaaggtatcttctttaaattttggatactgtcctgtgccaaacatagaatcatgattgaccatataaggcggaataacttctgtatagccttctttagcgtgttcatctagcatgaaattatagatagcacgttctaggcgggctcccaaacctttgtaaaagaggaaacgcgaacctgttactttagaaccgcgttcccaatcaagaatatcaagatcttcgccaagatcccagtgcgctttgatgtcaaaatcaaattgacgtggttttccccagcggcgcatttcaacattttcatcttcgtcagcaccaagagggacatcatctgctggaatatttggaagagttgttgtaaatgtctttagttgcccatcaatttcgactaattgggcatcaagtgctttgatttcggcagataatttttgcatatcagcaatctgctctgatgcatcttcttgattacgcttagcttgagcgatagctgcagaagcagtattgcgttcagctttagcttcttctgatttgataagcagttggcgacgtttaaaatccagttctttcaaatcgtgtagtgtcttttcatcaaccccacgtcttgccaatttttcagcaatttgatcaaaatcattacgaatgcgtttaatgtctaacataaataagataccaagcccaaaaaagcaaagcaaaaataggaattttgacaatgaacgtttgttttctaggaaaaactattttttgcacagcttatagggcaggttcagttaacttttttacctaaccaaaccttcctttctatattttataaaaaacacagacatgttcttgctggagcgcttgggcgcggttccatccagcttcacaatgactgtgctcttaattacgataatcatttaataaagattgtctcattcagtcttggaaactggatggaatcatctataacggtagaatttcggtcaatcactctatctgctcgcagctgccgcagactttctgcaaaagaaaaggacctacttatccgttgttcttattatacaggatttaaaaaagaatgtaaataaagattgtttaaaaaatgatattggaaaatttcagtttatgaaagacaattaacaaagtttctcaaaatgaaaacattttcccactcacttttttcctatgttaaaataaagcattatgaataagaagaatgaaaaaataaaaagtttaccatataatgctggaatagatttcttacgtatttttgccatgtttatgattgtggtgacgcatgttttggggataggcggcattcgctcaactgtaaaagagaattttgacctttattattttgtgacatggggaattcaagtatctgcctatagtgcggttaattgctatgctttgattagtggttacgttggtgttgattcaccttatcgttattcaaaatgtctctcattgtggttacaggtcttcttctatactttattatttatcttattttttacttttttgcaaaagcctataacataccatgattggatacaggctttcttccctattatcacaggtcaatattggtatgtaacagcttattttggactcttgatttttatgcctattttgaatctagctttaagaaagttgaatactaaagatttgaaacatattgtccttttagcgatcatcttcttttctgttcttcctgcattattgaataccaaagtagatgaattttcatttgctaagggttttagtatgaactggttgagtgtactgtacattattggagcttatttgaagcggcttgacttaaagcgtttattcagtcgtaaatctttactttttctgtgtttaatggcaatggcagtgacttttataaccaaagtatttattggagatatctggtactggtatacctctcccactcttctttgtgaggcagtgactatttttatcttttttgtcactttagatattaaaaagactggtagattgtttagaatcattaaacgaatggcgccggcaacattaggagtttatctttttcatctaaatccccttttggttaaatttcttttaaaagatggttttgagtcatttgtgactgctcctatatggctttttccttttttgattttagggatggcgctccttatttacctcgtttcgactctagttgagcttttacggataaaactttttgcttatcttaaggtcagacaccttattcttaaattggatacttatctgccgtttgacaattaaaaggcctaatgaccttttttatcttgataacagtttgattttgatgaagttgtctagaaactgctgaatatgatttctttccagcatatcctatgagaatttatagagaaaattgactagatcttttcgatttgcaattaaaataacaaaaaaagctgaagaaaaaaaggttagaatattgaaacaggatgtgctgttagatgattggtctaacttaacattctacattttcttactctaacccttcttttttcgtttaaagaagctagcaatcttttgaagtaaactagggtagcgaaccactttatcattaccaacatgctgtcttgcaatttttagaattttaccagaatcagatgaggcaaagaggaattttcctttgtccgtaataatttcaaagtgtctgctgacctttttccgattgacattggctcctatttcaataatactagaccaaggaatttggataaaatgttccacattagcatcattatagaattcaaagctacgatcgccaagaagaaattttcccactttgccacctacgcctaaatatgatacacctttgcctgtgtattcaacttttgtattaattgactgtgccataaatttactcctgaataaatatattttattatatcaaaaaacggaggactgcgctattttagatagcaaaattagcgaagtcagctatactgctgaggctccctagatctgttgctcagcttttggacataaaaaacttcctctttatcttgaataaaaaaataaaggtgagtagatactaagaaaataattataatagcagaatatttgctattatatttcaataatactaaaaaatgactaaaataaccattaaatcatactataagttattttttatgttaaactagtgtgcaaaaatagaaagagagaaatattatgaaatgtcaagcgtttgaagattttaaagctacaagtttgaataagctgtcttatacgacaggtggagctactgatggtgaaattatagctaatcggatgttacaaggtaaagctactaagggcgaaattactatgtatacttggaacattattcaaaatggctgggtgaattcactcgtgtcttggggtattggtggttataatagttctataggatactcagctcaaggtaatagaggatttagtaattatccatacgatgtttctatggattcagataatagcagtagttcaagtaatacgacaggtggttatgttaattataaccagagttttaattctggatggtaaagttaaatcaagcagattttatcatgatgaggagacatttttatagaataattagtgcttgataattttatctgtacaagtggctaaagtcgaatgtgacaattattttcagggtgatgcaagtatatacataaaaatgggcttatgtatataggaaacactgtaatttatacctgaggaattgttcaaagttcatgtgaaaaaattatggagcgtatcgttagcaggttttctggtacaggtaatccccctctcctgtcaacttagatttaataattgtggattaggaatttcgtcagatggttcgttcctcatgctcaggagtttctgaacataagcagtataatcacagcgagtcaatgatggctaactaacaatacatcagttctaatatgagcactagcctgactacatagatgtcaggctttttgttaaggacacctctaaaaactctttttaaatcagaatcttgatttaacaacatttacaaatgttaaacagaagaaatttttgagtcttctaagtgcctttgagtagaaggaataatatatgaacatattttcttatcttcttttgactgtagtttcagtattattagtcaatttattcttagaatttataaaatacttttttaaaacaactccagcaatgaataaggaaaattctaagaaatcttcaatttttttgtggagtcgaactagacgttttaaatttgtaccacaagtcgataatagagactgtggcccggctgctctagcctctattgccaaacattatggttcatattattccttggttcatctgcgtgaacttacaaagacagatcgacaaggcaccacagcattaggcatcattgaagctgccaaaaatattggatttgaaacttactcgctagatgctgatatgtctttatttaattatgatgaccttatttacccttttattgttcacgttgttaaaaataaacgtcttcaacattactatgttgtttatgacgatgaaggagatagtctaatcatcggagatccagatccttctgtcaaagttattcgcatgtctaaggagagatttcagcatgaatggacaggtgtagctatcttcttttccccaaaggatgattatcagcctcaaaaagataaaagaagaggattaacaagtttcataccttcttttttaaagcaaaagagtctcttgttctatattataatggcgagtttaatcattactttaatagaaattattggagctttttatctccaagtaatgctggatgagtatattcccagtcaaaaaatttcaactttaggctttatcactttaggattaataataacttatgttgcccaacaaataatagcttttgcaaaagagtacttattaattatattaggacaaaggctggtaattgatgttatacttacttatattaagcacatttttattcttccgatgtcttttttttcgacaagacgaacgggagaaatcacatctcgcttcactgatgccaatcaaattattgatgctgtggcgtcaacaattttttctattttcttagacatttcgatggtatttatagttggtggagtattattaattcaaaatgtcgttttatttttcctagccttgctctgcgttcctatctacattatcattgtttttgcatttatgaaaatgtttggttacttaaactatgaggtaatggaaagtaatgcgataatgtcttcatctgttattgaggatattaatggaatagaaactatcaaatctttgacgagtgaagaagttagctatcagagaattgacaaggaatttgttgattttttagagaaatcttttaggctgcataagtatggagctattcaagtctcaattaaaactgctgcaaagctaattttgaatatcgttattctatggtatggagcacgattggttatgaccgggaaaatttcagtgggtcaaatgattgcttttaatgtgcttttaggatatttttcaagcccaattgaaaatatgattaatttacaaattaagctccaatcagcccgcatagctaatacgcgtctcaatgaagtctatctggtcgattctgagtttgaaaataatggggagctttcagaaggcagctttttggatggggatatctcttttgaaaagttatcttacaagtatggttatggtcgtgatactctgtcagatatcaatctaactattaaaaaaggttcaaaggtcagtctggtcggagcctctggttctggtaaaacgactcttgccaagatgattgtcaatttttatgaacctatacagggtcttatccgtcttaatggctatgacctaaaagatatagataagactgttttacgccagcatattaactatctcccccaacaagcttatgtctttagtggtaccattatggataatctgaccttgggagccaaggaagacactattcaggaagatattattcgagcctgtgaaattgctgagattcattcagacattgaagaaatgccgctggggtaccagactgagttatctgatagtactggagtttccggtggccagaagcagcggattgccttggctcgcgctctcttaacccaagctccagttttgattttggatgaagccaccagcagtctggatgtcctgactgaaaagaaaatcgtcaacaacctcatggccatgaccaataagactattgtttttgtggcacaccgtttgagtattgctcaacggacagaccgaattattgttatggatcaaggtaagattgtggaagaaggtagccataaggaacttttagctcataaaggcttctactacaagctgtttaactaagggagacatttaaattatccgaaagcccccgtcgctgccataattttctgacagtgttagttgtacttgttttgattattttcattaaagcttttctctgttttatcaagaaagagctttctatcatctctcaaggtgagcaaggataacttacttcataaatggagaattgaatgttaacttttacacaaatgtgaagtgcaatcctaattgttagatttttttctaattgttgggatgcattttattttttgtatcattcactaggaaatatcaaaaaaaccatacccaatttttttgaaatcagatatggaaaattctaattttttgtttacatcaatccaatgacgtgagcaataatacctacaacgaacagtccaagaatcattacaattggagaaacttttttcttaagcaaccacatacaaagaagtgtaagtagaagagccatcaaacctggaagtaatttatccaattgatcttgtaaagtttccacttttacatttgttaagcttaaattatctttaacaccttgaagtatcttttgaagctgaccactatgaataacttcgctgtctttggggaattgtatataagtggctccattatcattcgttaatttagttgatgggagtttcagcgcgaaattaatcgttacccaacgctgaacaagtgccccaataacaaacataccgaggattgaagcccccttagtaatatttttgagaatccctcctgagagatctttagtaatttctgtccctgctttatagccaaactcttgtgtataccataagaaagccatacggataatgttccaagcaaagaagaagatgattggtcctaggatgtttcctgatattgcaagagaagccccaagggcacccagtgttgggcgaagaacaaaccagaaaacgggatctccgataccggctaatggtcccatcataccgattttaattccctgaatagcagcatcatccactttggtaccgtttgatttctcttcttccaaagcaagtgttactcctaagataggagcagcaatatatggatgagtattgaaaaattccaaatgacgctcaagggcggcagcacgatcttctttgtttgtataaagttttttgatagctggaatcaaagcatatgcccaacctaaattttgcatccgttcatagttccaagaaccttgcaggaaggttgaacgccaccatactttatgacgatcagattttgatagttgaattctttctgacattataatgctcccttctagtaatcctctaagatatcgccaattggatcgtttgaactggaagacgcttgtccactactactgtttctaccagtttgattagtaagggcgatataaatcatggcaagtgctacacctatcataccaagtccaaacaaagtaatttgtgtatctgggatagcggcgagaacaaaaccgataataaagaatggccagacttctcttgtagccatcatgttaaggatcattgcataacctacggcgactaccataccaccgccaatagtcataccatcagatagccaactagggatagcttccagtattgatttaacatgattagcggggagtgcaagaagcagggcaacagggaaaacgatacgaagaccttgaagaagaagagcaaaataatgtgagcgttcaacagcacgaatattaccattctttgcggcagcatcggctccatggacgataccaattgaaatagcgcgtaccaccattgttagtgcaagaccggcaatagcaagagggactgcaacaccataggcaatggtaatacctttttgtgaaaaatctcctcctttaatcataatgactgccgctgcagttgaagcgagtgcgacatcaggagcaacagcagcaccgatatttgcccaaccaagagcaagaaattgcaaggttcccccaagcataatacctgcaactgtgtgaccagatgctaaaccaatcaaggtacaagatacaagtggttggtggaattgaaattggtccaagataccatcaagacctgcaaggaaggcgatgatgaggaccaaaataatagaaataactgacattattctagttcctttcgttgtttaataaataaagttattggacatgtgctttctcaatgagttcaaacaagtctttttgagaatcgtttggcactttacggacatcgaatttaactccgagatcacgtagcttttcaaaagttgcaacatcatctttatccatagatattacattgttaaccatggttttaccagttgagtgagccattgagccaatgtttaattctgtgattggaacaccgccttcaattgcttcaagagcttcttgcggtgtttcaaataagatcagtgcatgtgtatttccaaaacgcggatcttttgctgcttcaattaattttttaattggcacaacattagctttaacaccgccaggtgcagcttgcttaattaatcccttacgtaattcatccttagcaactgtgtcagatgcaacaatgatacggtcagctttagaagccggcgtccagttagtcgcaacttgtccatgcaaaagtcgtgtatcaacacgtgcaaggttaattttaagtttgccatcaccaatgacagtgccttcggggatagcaccttgaggagctgcctttttagtagatgttgtaggagcttcttcctgaggctgcaatttttcaggaaggattttaactccgtctttggcttctttgatgatatttgcagcaacctgttcaacgcctgcagcagcatccatcatgcgttctgtataggcttgaataagcattggcaaattaagcccagtaatgatagcaaatttacggtcagaattttcttccatgacacgactggcctgattaaatggagaaccactccatagatcagctagtactaaaatctcatcatcagcatcgaatgcagcaattgcatcgttaaacttggcataaagatcatcaggtccttcacttggcataaaagtgacaacctgaactttttcttgatcaccaaagatcatagaaccagattgatgaatgccggcggcaaattcgccatgactggcgataacgattccgatagccattcttgttcttcctccttttaaatattttttctcagataaaaagaataatgttattctctttaattaaagaaatttaagaacattattattgtaaaacgtttacataaaaaaagcaatagcatttgaaagaaattttcaaaagacagcaaaaaacagcaaaagtaatcattttgtctatttaaaatataagaacttgtattaacaatctttttaactgtttccttaagtggtaggaatggtaaaacgaatatcaatactatgactgttgcattttgcactagtttagttttatactaaacatcaaactaaagacctcaaaaatcctcccatattgcctctgagggttaatattctttttatcacggcgaaaactgttcttttattgagattgggacaaagtattccgacttttttattgtgttgtgtttttccgtttaatgcagtggatgattggagattacctaatcaattttgcgaaagcgaaataacaaaattggtattgccatttcatgacggcttaccgattttttatacgtaatcttatagatttatactattttgtgggcgattgcacagtaatcataaaagtctattccattctcttttactaagatagagtatttctcatcgacaaaatagtttctggaatataggttttaaaaaaaataagtactaaatttactatattcgatttcttatggaaattgaaagaaactaatagaatttttgaagtgttcttgcttgagataggcaaaaaagagcgtaatatagaagtcagaaaatctaagatttttacttcttatcacactcttttttagcattaaaatgtatgaaactgccagctctaaataagaaaatgagcgttttacgtcaactttaagcctcttctttttctgctagtatccttgctttttggatagtatagaaataaagaacaataaaagcaatttgaataattaatgaaaaaacggcaaatgttccaaagataaggctatagataatgtcaaacgttttaataccaatacccaaatagtaaggaataaagctgatagtttgttgcttttttaattttgaaagattaagaaaacaaaagacagcaattgtagcagcaataataattgccaagatagtaatcgagatagataatggtgtaatactttgtttaactgcagctagttgttttgctgttaggttaaatttatcaatggttccatttttcattgcttgttgtatggaaacaatgccaagtaatccccaaagccccaagacaaaggtcaaaatattaagaacagcgatagcaatagtgctgcttttaaaagctcgggctgttttttcgtatgatatcatgtaaacctccaaaaataagcttatgttaatagatacaagcttattttaacataaactaaagtagatggaaataggcaaggaagaatttatctttgctattatttcttaaaaaataagtcaatgtcagcttgagataagccaatcatagggtcaatcgttaagatatttctttctgtcaaaataaaatcttcttttaatatagctgcactttcttttactccttgtttatttttctcggtgttatggtggccactgcattcatccttcttaaagcgttcaataagataagtttttcttttagttccttcatttttgatggcgttgtcaaaggctgcaatttctcccaacataacaagtttgctttttgagcgtgtgatagctgtataaatgagattgcgttgcaaaagtctgccgctttggcgtgtgacaggaagaataactactttaaattcactgccttgagatttgtggatactcatagcgtaagcgagtgttattttcaaccattcattgcgaggatagttaatctcagttccatcaaaatccagaatcatttcatcttgtttggactctgtatattttgcaggaataagatcagtaatgtacccaatgtcaccattaaacacgttaatttgcgcatcgttgataagatgaagtactttatcgcccttacgaaaatgaaggtcattaaattgaaattctaactggttatttaaaggattgagcaaatcttgcatcagtttattaagatgcgtaatacctgcttgcccacgatacatcggtgctaaaatctgtatttcctgagcatctataccacttttaagggcagaactgacaatcttttgaatcatttgcggaatgtgagtgctctgcgcttcaaaataagaacggtcggcctttttagctgtgaaatcagttggtagacgaccttggcgaatctggttagcaagtgtaacaatggttgagtcctcagattgcctgaatattttagttaaggaaacttgcggtaatctatttattttcagtaaatcagccaaaacttgacctggaccgacggatgggagctgatcgctatcaccaacaataacaatttgtgtatttgaagcaatagcactaaacaattgattggctagccaagtatcaaccatagaaaactcgtcaataataatgagatcacaatccagaaaatcatcaagtgcctgatattcactatcaccattaagtcctaaatgccggtgaatggtggcactaggtaaacctgttagctcattcatccgtctagcagcacgaccagtcggggcagccagaataataggtcggtcacttttttgcaggtcaatttgatgcaaattagcataagccttaataattccattgatgacagtcgtttttccggttcctggaccgcctgttaaaaggaaaaccttactttggatggctttttggatagcatttttttgtgccttgtcatagttaatattaaattctgcttgaatatgtttaatttcagtttgaatgtcttggctactgatcgctttttcaagtggtctatccagaatgcgggtaagatgcttatgaatgcctgattcggcataaaaaagcgtattatcaaagattttagtaccaatattttgtaccttattttcggagattaattgtgtcagttcctgagcaatttgactgggatccagttcgacttgtctcacctcttcaagaataaaaagagatttttcgagtaattctttggcttcaatataggtgtcacctttgtcaatagaggtttctaaaagagtatgaacaagagcagcacgaaaacgctgaggagcatcgctgttaatacctacttgttctgctaatttgtcagccattttgaatccaatgccttgaatgtcctcaaccagttgataaggattttcagtaataacagtcaaactttcttctttatagcgttcaaaaatttgaacagctgttttgttatttaatccatattctgctaattttgccagaatctgttcagcaccgtagttaagacgaagtttactaactaaattttctctattagccttagaaagtccactaatgctttctaacttatcaggatcttccagaatattatcaatagggtcatcaccatataagtgaataattttttcggctgtttttttcccgattcccttgaaatgctgactggaaaaatacttaatcagaccagcagaagagggtttagcacgctggtatctttccacttttaactgctgtccatatttaggatgctgggtcaattcaccccaaaaagtatagttttctccttcaataacatcagcaatagtacctgtcacaataatttcaaaatcatcaaaatcgctgtcagtatcgtcaatttccagaagaataattttaaaaaaattgctggtattttcaaaaataacacggtcaatggtgcctgaaaagtaataggtcataatatttccttattaaaaatcggaagcggaataagttcaaaagatttctgaactgtactctgcttccgttagagataaaaactttttatttatttgaaatgaaacgaatagcgtttaaaggccaaaagcggaatttaacttcaccaacaattttattcttagcaaaagttccaacatggcggctgtctttagagacaatgcgatcatcacctaaaagcaggtaacgtccttttggtactttaatcgtaaagctggcgtttccttgttcgtctgttgtgaaagctgttgattgtgaggctaattcttggaaatactgattgtaggcataagtcttttggagtttgtccttggcaaatttatccttgtattgcttgagataagtttcattgacttttttcccattaatagaaagcatatcattttcataggtaatggtatcaccgggcatgccaatcacacgtttgacaatatttttattgccttcagcagcaacaacaatgtcaaaatgtttgatagaagttgtcctgacgacaatgagatgctccccattggctaaggtaggatccattgaatgtccatctacttggacaggaaaccagataaagagacgcgggagtagcaatgcgaaaatgatgaccaagaaaaggccccattcttttaaaaatcttttcataatatcttatatcttcttcctattctttttttaataattgataagctttttttgtgtttttaaagtgtagtttggcagttgtctctagacctaattcaccataagtttttaaaatttggctggcaattttatcagattgctgcctagccccactaggtaagttgaatccaactttttggctcaactcatctaggttatctaagaaaagtttacgagcaataatagagctaacagctactgctaaatactttccttctgccctttcttcaagggtcagtgggttggagaaacgattattttcgttcttaagatatttttggtaatttttgggactggtgaaggcatcaataacgattttatcaggttgccatccttcttggagcaaaaggaaaatagcttgattatgcaaagcgactttaacagaaacagcattgtgtaatttattatcaccaacaacctcattatatttttgaggggacaataaaagtgctttatgtggcagcttggcttctaataaaggagcgatctgtttaattttaacatctgttaagtttttggagtcatcaacacctaattcctttaaaaaggcatggtcagcttgcttcacaaaactggcaacaacagccaaaccgccaaaataagaaccattaccaacttcatcagaaccaatcaaagaacaatcttgcttgttttttatattgtcttgattggacttatgaacaactggattgtaaccaagttcttgagcgactgctgaggcatttttaccttggaaaacgacctttctagaagcataaattaaaatcgttgcttgtttaaacttagctgcaaagcgaatataaggattggcattttgaacttgatattctttcaatgtttgaatcaaatgttgaatggtttcttcatcaagttgcaaaacaaaagtattcataagatacattttagcataaaataggtcatctttggagaaatctgatgttatatttatgattaaattatcttttaaaagttttttataaaatttttaaaagataattccttattttataggcttttaaccattaatctcaaaatctctaatttacgaaaaactcattttacgctataataaatttgaggtggaattatgacaagcaaaaatcgttacaaattcacatttggtgaaaaagcactcactttaacaacagataaagataatctatttatggaagaaattgaacgtgttgctaaagaaaaatatgatgctatcaaagagaaattgcctcaggcagataatgaaacaatagctatcttgatggccattaatgctttatcaactcagttgagccgagaaattgactttgataaaaaggaggaagaattagaaaaattcaggacaaaagaattatctattcttaaagatcgtgctcaacgaagcggagctaaaaaatgatttcgctgctaattcttctgcttttagcttggaatttttacattggctatcatcggggtattattttacagacttattatgttatagcaagtctaatttccttgggaatcgcaatcgtttactataaaaggctggcaaatgtattaactctttggataccatattccaatgctagtgagaatgcttctgttgccttttttaaaacagtaaatttatttgaattggatcaggtattctatgcgggtctggctttttttactatttacgtattggtttattttgtttttcgcttattggggatttttgttcatcttgtgaaaacagaccgttttaataaggaaactctcaattattttagtggtgcaatggcagtattagtgactatgctgactgttagtctttttttgaatgttttggcagccattcctatgtcgagtcttcaaaatattttatctgaaagtttaatgattcgtttactaattgacttccccctgttttcttggtttattaattatttttgggtaacaacaatagtgaagtgaggtttgtcctcgcttttttatcatttttagaagcttagcttttttgccattatgttataatagttccatgaatacaaagattttaaaagccttagaatttgataaggttaaaaagcaatttgctcattttttgcagagtgagcaagggcaaatggaattaaacgatttattacctatgaccaatcaggaaaaaattgaacgttcttttgccgaaattgcagatgtagcacagatttttcaggagtatgcttcctttggctttgggcacagtcaggatatttcagaaagtttacgtcgtttagaattaggagcggatctcaatactcaagagcttttggctgtcaaacgtattttgcagatgtcagcagagctcaaggacttttatgataatttagaaaatgttgatttgcaaattttggattgcttatttgaaaaggttgaaatgtttcctaatttgcaagggagtctacaagccatcaatgatggtggctttattgaagattttgctagtcctgaattaactaaaattcgtcatcatattcaccaaaatgaacaacaaattcgtcaaattcttcaagaaatgttgaagaaacaaggtgatttattggctgaaaaccttattgccagtcgcagtggtcgcagtgttcttccagtgaaaaatacttatcgtcatcgtattgcaggtgttgttcatgatatttcagcttcaggaaatacggtttacattgaacctcgagctgttgttaatttaaatgaagagatgactcaggcgcgtgcagacgaacgccatgaaatgactcgcattttacatgatttatccgataggctaagatcacaaacagatattattggtaataatgcttggttgcttggacatattgattttgttcgtgggaaatacctttatatgagagaaaatcaagccagtcttcctagtttaacaacggatcaaactatccgtcttttgagtgtacgtcatcctctgctaagtaatccaattgccaatgatttacattttgaacatgatacaacagccattttaattacaggtcctaatacgggcggtaaaaccatcatgttaaaaacattgggaataacacaactgatggctcagtcaggtcttcctattttggctgatgagggaagtaaggttgctgtttttaaagacatctttgcagacattggtgatgaacagtccattgagcaaagtttatccactttttcaagtcatatgacacatattgtcgaaattctgcaaaaggccaataaagacagcttagtcctttttgatgaacttggtgctggtacggatccacaagaaggggcagccttggccatgagtattctggaacatttacgcttatcagatattaaaacaatgattaccacccattatccagagctcaaggcctatggtatcgaaacagaatttattgaaaatgcgagtatggaatttgatatggtgacgctcagccccacctatcattttatgcaaggagtaccgggacgatccaatgcttttgagattgcacgtcgtttaggtttgtctgaaattattgttgcagaagcggaaaatttgacgaatacggattcagatgttaataaaattatcgaacgtttggaaaatcaaaccattgaaagtcgcagacgtttggataatattcgtgaagtggagcaggaaaatctcaaatttaatcgagccgtcaaaaaactttataatgaattctcacatgcacaagacaaagagttgcgtaaggccaaactaaaggctcaagagattgttgacaaggctcttgcagagagtgattttattctcaaaaatcttcaagacaaagcacaacttaagccccatgaaattattgaagctaaaggcaagctcaagaagttggttcccgagatagagctttcgaaaaataaggttcttaaaaaagctaagaagaaacgtgctgcgaaagttggagatgatattattgtcagcagttatgggcaaagaggaacgcttactaagcgcttcaaagatggtcgttgggaagcacaagtagggctgatcaaaatgactttacaagagtcagagtttgatttagtgaaatcagacaaagcccaagcatcgcagaaaagacaagctcaccttgtcaaaaggacttctcaaaaggctcctagtgctagacttgatttacgtggcaagcgttatgaagaagcgatgcaagaattagatgaatttattgatcaggcactcttgaacaatatggctcaggttgacatcatccatggtatcggaactggtgttatccgtgatggcgtaactaaatatcttcgccgtaataagcaagttaaggagtttggctatgctcctcaaaatgcaggtggttcgggcgctacaatcgtgactttcaaatagcgtagcaaatattaggcaaatataatcttttagtgtagaataggcttatcaaaatgatgaaggagaaataatatatgacaaaagtagttacagatgcaacttttgaagctgaaacggctaagggacttgtacttgttgatttttgggcaacatggtgtggtccatgtcttatgcaggcgccaattttggaacagctttcagaagaattagatgaagatgaactcaaaattgttaagcttgatgtggatgaaaatcctaatacagcacaaaattttggcatcatgtcgattccaactttgctttttaaaaaggatggcgaagttgtcaaacaagttgcaggtgttcatacgaaagatcaaattaaggctattgtagccgaacttgcatagtataagcaggcttcaatgcctgtttttttgataaaaacttgacttagagtccactccaaatgttataatgaagcaaatttcaaaaaggagaaaataaatgaaaacagcagtgtttgtaaaagctggtcaaatggccattgaaactattgagaagccaagtgttattgaagttgatgatgcgatcatccgtgtcgtccgtgcttgtgtctgtggttctgatctgtggtcttatcgtggagatgatgacaaagctacgcattcagccaactcaggtcacgaaattatcggaatcgttgaagaagttggctctgctattaatacagtgaaaaaaggagactttgttattgcaccattcacgcatggttgcggtcattgtgcagcttgtcgtgctggttttgaaggaggttgtcaaggacacgatcggtcaacaaacttttcaagtggttatcaagccgaatatgttcgttatgctcatgctgattggtctttagtaaaaattccgggtcaacctagcgattattcagaaggtatgattgcttcgcttttagctttggcggatgttatgccaacaggctatcatgcagcgcgcgtggccaatgttcaaaagggggatacggttgcagttgttggcgatggagcggttggactctgtgctgttaccgcagctaaaatgcgtggagctaaacgtatcattatcatgagtcgccacaaggatcgtcaggaattggcgttggaatttggcgctactgatattgtagaagagcgcggcgaagaaggtgtagctaaagttcttgaactgacaaatggcgatggtgttgatgccgctcttgaatgtgtcggaactcagctgtctactgaaacagcgttagctattgcccgtccaggtgcagctatcggtcgcgtgggtgttccacataccaaagatattaatctttccgattacttcttccaaaacgctattattgcaggtggaccagcatcagtaacgacttatgacaaatcggttcttctcaaggctgttcttgatggtgagattaatccaggaaaggtcttcactcaatcttacagcttagatgatattgaccaagcctataaggatatgcaggagcgcaagaccattaagtctatggttgtcgttagcaaatgattttgtctcaataacattatcgttataacttgtttggtgttaaatattttttataagcacaaaagccactgattttgtttttcagtggcttttgtgcttataataattgattgatttcagtttatccgtttgtgaggttataaatggacaaattctgagtattatggtttttcaagtaggtcaactattatttatttttgagatattcagctaacatttttttctgaggtgtggcaaaaggataattggcaaaatcttccatagcaacccagcgaacttctttattacttggcagctcagccatttccacaaaaccttccttaagttgaatagtccatttttgatgactgaatgtatgtttaactggtgtgaaagctaggtcagaccaagtgggcttgagtttataatcttgctcaaatgtagccttttgtgacaaggtttctagaacaacatcatgattgtcaaataagtccagttgctgtccaataaagtctgtttccataatgggaaaggaccagaagccacctaacagtcgtccctgcgtatttttttccagtaaaaattcatccttggcatttcgtacgacaaaggcttgaatttgtatgggtttaggttttttcttaggcttcttgattggatatttgtcataggttccatgtaaataggctgcattgaaggaacgaataggactttctgcaggtctaggatttttagccgattcgatgtctgttcccaaatccattagagcctgattgaagtctccgggatgttcaggatcaatcaaaattttcatgatggcttgaaaaattttacgatttttagcctctccaatatcataattcacttcaaataggcgtgctataacgcgcataacattgccatcaacggccggttggggcaaatcgaaggctatgctagcaatagctcccgctgtgtagggaccaatgccctttaattgagcgattgtttcgtaggtagaaggaaatttgccatcaaaatcagtcataacttgctgggcagccttttgcatatgacgaacacgagaataatagcctaaaccttcccaagccttcagtaacttctcttcaggagcgtcagctaatttttcaatggtaggaaagcagtctaaaaatcgctcatagtaggggatgacagtttgtacttgtgtttgttgaagcataatttcagatacccatatgcagtaggggtttttagtgcggcgccaaggtaagtcacgtttttcttgattataccaagttaataaagtctttctaaaggaaataattttatcctgattccacatttcaatgccgtagtcacttagatttaacataaatctattgtatcaaatgcccttttattttccaaaaaagttgtattttttaaagttttattcttgacaaatgtaagcggttacgataaaataaatttagaaaaaagataagaaatctactaaaggaggaattctatggtaagattaaatattgcgcggtataaaaacggagactaaaggtctctagtaatgtcagttttgttgattacaaggaggtggcgcttatgttaatgattgatgtaggtcgctataaaaatggtgacaaagaatagacagcaggcagtaactttataacaattgagaataaaatggagaagcattcaattaaatataagctaaatgaggaatgtggagaacaagaaaccagagacaaatgtattttatttatagaaagtattggatggtcttgttcaactccctcaagaaaactcgcgagtaaggaaatgcttcaacgatattaagatagagttatagtcaaggtctaggtagatatatttaggtcagagagctcaaagacctgatgattcttaagaataagaagaatattaaaggaggtctaccaattttaaaaataattcggaaaagctataaaaatagtgaataactccttataaaatcaaaaagtgcaaaggagaagtccaatgacactttaattgtaaaacaaaataataagagacccccaacgatgagcgtgtagattgttgggggtcttaattgtattgaaggtatacaaatttagaaaagcaaataagtttgttgaccgttataatcttataactaatagtgatgtaaaccaactatttgattttaaagtaaaaaatggcataaatcgctattacgagatattctaagagactaaggtccgaaacaaatacagcgaacagctttgctaggggttgttgtactgattcttgctaaagttgaaaagctagctgatgcgataagcatcactattattgaaagataaagttttttcattacatagcatactcttgcgcccagcctctaaaaccctttcaaatccgcctattacagcgtcagtcatggctccgccaagcgtcgtgacctcgccagcctaaacctaaagatccaatatctgcaccagcacatctgtaagagaaagcttcactagtcgtatatgcggctctgtacaataaacttaaacctagtccagaaccatttacttgtgcaagataatctgctcccaatgtttcaaattcttcaaatactagtgaatccataaaactttctttatattaaaaaataacattttagcacttaaacttttcctaatcaacttcaaacaaaaaagtaatttaattgataggaagaacataaatttctgatcatttttattaattgaatagttaaaaaccttactgattgaaagtcaatatatgcatacaatgcttttcttttagcttttttattctaagaatttctcaagatttgaggatggttttagccgttattaaaataaaaggtcattgacaggtttatatagtagtgataaaataggacaaattttagaaaggactaataaaaatgaatcagaaatctaaaaaatcgttgactccacttgtacttggtattttttctcttccctttgctatttttccagcgattgttggtttaattctcggtatcgctggacttatacttgctatcaacaaaaataaagaagaggaatttaattataggattgaaattattttgaacagtcttggtattattatcgcagctattaatatgattattgggtttattcaaggtttcaataatggaatgtgataaataaaagaattctaaattctgaacattaatttgtagatagccattttttcttgcattatggcctataatcctgtataataatattttgtgagtgtccctcacttaccccttgctaggacttggggtcattagaccaaaaggaggaaaattcaatggctaaatacgaaattctttatatcattcgtccaaacattgaagaagaagcgaaaaacgctttggtagcacgttttgatgctgttttgactgacaatggtgcaactattgttgaatcaaaagattgggaaaaacgtcgtctagcatatgaaatccaagatttccgtgaaggactttaccatgtcattaatgttgaaactgaagatgcccatgctcttaacgagtttgaccgtctatcaaaaatcaataatgacattcttcgtcatatgatcgttaaacttgacgcttaagaaggttgtggtagtttatgattaataatgtagtactagttggtcgcatgactcgtgatgctgagctccgttacaccccaagtaatcaagctgtggcaacttttacgcttgcggttaaccgtaattttaaaaatcaaaatggtgaacgtgaagctgatttcattaatatcgtgatttggcgtcagcaagctgaaaatttagctaactgggctaaaaaagggactcttttaggcattactggtcgaatccagacccgcaattatgaaaaccaacaaggtcagcgtgtttacgtcacagaagttgttgcggataatttccaaattttggaaagtcgtgctacacgtgaaggtcaatcaaacagttataatgctggtggtaacaataactttggcggaaataatttttcttcccaaggttcttcacaatctcaaacgccaaactttgctagagatgaaagtccatttggtgattcaaatcctatggatatttcagacgatgatcttccgttttaagaaaaatataaagaaggagaaaaaacaacatggctcaacaacgtcgtggcggattcaaacgccgtaaaaaagttgattatatcgcagcaaataaaattgaatatgttgattacaaagatactgaattgcttagtcgttttgtttcagaacgtggaaagattcttccacgccgtgtgacagggacttcggctaagaatcaacgtaaggtaacaacagctatcaaacgtgctcgcgtaatggcacttatgccttttgtaaatgaagattaataaaaagaccctaattgtactgaccccaaaaagttggacaagaaattattgaaaggatttagtcctgtattgcacagggctgagtccttttagtttgtcttctaaaaacttgaaaaggacaagggtaacaagactgtcttcattctgattcaaaatgtcaaagagtttgggacaaaagtctcaaactccttcaatctgtgcaacatcaaatgtttgacgcagtggtttatttacaaaattgtaagttatagtacaaagactgtaagattagggctgacatttttcaactatactaatagtgaaaaggaggacagactaatgaacaggttccaattcaaattatttctagctacttttatgatgctagatcatattgactttttggtttcagaagagatgggaatttggctccacatcttgacacgttttgtggcagttggtttcgcttatttagctgttgaaggattcttttatacgaaggatatcacaaagtatctcatgcgcttgtatatagcggcaggattgatgtttttgggaaataatcttatcaattttatgctgcataaacctcaagtagctgcttatcataatatcttcttgaccttagccttgggagttaccatgctttggctttatcaaaaaatagaacacaaggtgacaaagattattgtgacggtttcggttctgttgttaggatttatctttactgaaggaggagatgttgttttaccgtttatgctgattacttacttgaacttttccaattcattgcgtcgcaatttatggtatttagctttatcggtactactattctttacaattgtaggtattccaatgccttcttcctctcaagagagtttgacaaatttaatacttttgaatcctgacttttgtttcgttacgattattcctttattgttcctttataatggtcagcagggccttaaaaacaaattcagccaatatttcttctatgttttttatcccgctcacctttggattttagctatcatgcattatttactaataaaggcgtaagatatcattaatattgaatgtttagagatcccatagccactgttccagtcaatgtaacgttaataaaatcaccatttgtgctaggaaaacctgaaaatgaaatggaagcaaagggggagtgagttttattgatgattttccagttgtttggaatacgcagattggtttcaccaaagctaacatctatatgaatttcgggagaatctgtcataaattgagcttgagagagatcaacagattgttctccaaacttagtgtcaataataattttatttaattcttgagaagtcacataactggtattttcagaaaaaagtgtttttaaaaagacatctgtttcgttatcaatgtagttagcattttgtttcatattaaaataatgatttcctttataagaataagaatagtgtggtttgaggaaactatttaaaataacgccgataatgattatacccgtaaaaagcggtccggtagaatagtcaaaatgaaatatatctttcaagtagatactaagaaaacctaaggctagaaagaaaaagaagatactcctgttactcaaagctattaacataaagaacagggccaacatcaacatgttgctaaagaaaatatgaaatcccgggataaaagcaatagtaataaggtaaagtgcgagaagcccaagcagaccgtaccaaaaataattttttttcatagtaaactcctttttttcataagtaattctttgtagtatttacgagatacccaagttgttttggatgaatgtctaaaactaattttgggggtagaggagaaagacttattgatggcagaaatttcaaggctattggcaatctgactcttgccaatttgctgaaaataatcaggtaaaatttctttgaaatcgcgcagaagcaaatggcttttgtaaactttatcattagtatgaacataagttttccgattgctgatttcaataaagagaatatctctaatatttaaaaagaaaatttccctttctaaaaagacctctactgactgatgtttaggatttaagtgaatctccataacaccgggcgccactttgtcatcaaaaatgtatcttgtctccatgtattaactatagcataaaaaggttaaaaatgaccacttttctatcaagtggtcatttttaatgtctaagaggtaaccattagtgataaatgtttattttctttgttgaggagccaaagcattttcaatattatattttttcttaagcagataacgaataccaaaagcgagggcacaaataacaagcaagacgaagcctggaactttgggattgagaaaagctggtaagaagcctgttgctgcataaagaaacatccaaaaaatcatgaagaatgctaagatcccaaatgatttgataaaactaggacgttcacttttaggcattcctgagtagcgatagaaaaagtgataagttaaaaacatgatagcaccgccaccaaagccaagaaaggtaagtgtcacaatcccgtaggtaggtgcttgtttgctaaaaaaatttaaaaatcctgttattaaggtcacaacagcaaggaagaagagggaagtatctagccacataagccagggatttgtatttttaggagcagaagctgttgacttgttttgttctgtttcaataaattgagctgcccaagcagttggtgcacccaaaaaagaacgtgcggggattccttgcttttgtttttcgataatttcaggtaaagtcttggcgagaatagtttgaatatcttcatcggatttacctgattggagtaattgatgtgttacaatattgatgaattcttgattttttttagtaagattttgtacatccatgagtgttttctcctgtttgtgaaatagtgtgataaaaataatttaatgaatatactttatacttgggtattttgagtaagcggatgagacttaccacctaatagcggatgctgtagaatgtcggatacttaagcatccgacaatataaaggaagttacgaagcacaagggagagaatcgatactattctcttccttgcgcaagtaagtgggttaggcataccgcctaatagcggatgccgtagaatggcgagatgcttaagtatctcgccattctaacccagttaaaaccattttttgcgaatgaaataaataacgacaatagcactcattgctgctgcaattaagacgatataccagaaagcatgattcaatccatttagtggtaaccagttattttgaaaattcataccataagcagagaaaatgacagttggtatatctaaagccattgtcatcagagctaaagttttcattatagtattttggttgttagaaataattgaagcagaagtttcagtcataacattaaggacattttcatagatacctgccatctcaatggcctgttgtgtctcaattaaagtatcttccagcaaatcttcatcttccacatattttttgagactggatgtattgctggagagctttttaacgattcgttcattaagttttagagaggctctgaggtagacaattgatttttctaattccatcatgtcaattagctgttcattgcgtgttgctttttccagctgagcttcaattttatcgctttgacgatcaatagaacgcagggcagttaggtaaagtccggcattgcgatagaggagctggaaaacgaaacgtgtcttcatgaaagtataaaaattacgaatacgatggctccagaaattgtcaaagagagtcaaagattctaaacaagtcgtaataacagctgtttctgtgacaataataccaagaggaattgtaataaagtaacttctgctgttgcgttcttctggtgtgggaacgtcaacaataatgagagtataatcatcctcaacagaaacacgtgaggtttcttcaacatcaagcggtgctcttaagtctgtgatatcaatattgaacctttcagcaatctgtaaagactcttcctgggagggattgaccaaattaatccaagcacctggctcgaatgtttcgatttctttaaattcggttgctgttgaaagaaacatttgcttcatgacaagccctccttttcattaattgatacataccgttctattatactacaattctcagttttttgggacaggtaatagtagaaaaatttgttataatagaatgtaaattgattttatggacttaataagtgcgagaaaagtttagatgatgttctaaatgctcgaaatttagagacatatttttttcgacttacattgatttacaaagaggattgccttaaggagtaaatgtctggtatgcaaagcatacagcattgcattgcttttctaaaattcagtcgctttttagaaactttgtattcttttgagaggatagaacacgagtttaacactatgtgaaaaaaggtaggtttccttgagttttatcaactcatcattaatcttttttccctttgtactttattttatgccctttgtattatagaaaggattggaatacgggactaattttctatgaaaaaagataaactttagtgtgcaatcatacggcatcagtttcttattttcgacgaaaattttcggcaagccgaatcgtccctttatatcattagaaaggaattgaacctgcctatactcttgtgaaaaaagataaagttgcttagaaacgtattgtttcgtcaccaattttcctattttcctttggagtgtttaacggcttggtatcttaattatgcaagataaattaattattcgtggagcgcgtgctcataacttaaaaaatatagatgtggaaattccgcgtgataagttgattgtcatgacgggcttatcgggttcaggaaagtccagtctggcttttgataccatttacgccgaagggcaacgccgttatgttgagagtttatcggcttatgctagacagtttttaggaaatatggataagcctgatgttgattcgattgatggtcttagccctgctatttccattgaccaaaagacaaccagtaaaaatccacgttctactgttggtacagttacagagattaatgattatctccgattattatatgcacgcgttggtattccttattgtaaaaatggtcatggtgctatcacggcttcttcagtagagcaaattgttgatcaagttttgaccttgcctgagcggacacgaatgcagattttggcacctgttgttcggcggaaaaaaggtcaacataaggcagtatttgatcgcattcaaaaagatggctatgttcgtgtgcgtatagatggcgacattatggatgtagcagaagttcctgaactttcaaaaaataaaatgcacaacattgaagtggttgttgatcgtctcgtgcaaaaggatggtattagaggacatttgtttgattccattgaagcagctttgcatttgggagatggttatgtcatcattgatactatggatgatcatgaattgattttctcagaacactattcttgtcctgtttgtggttttactgttccagaattggaaccgcgtctcttttcttttaatgcaccctttggttcttgtcctacctgtgatggtttagggattaaattagaagtcgatttggacttggttattccagatgagaataagactttgagagagggagcgctggctccttggaatcctatttcttcaaactattatccgcagatgctagagcaagccatgaatgcttttggtgtagatatggataaaccttggaaagatttatcagatggggataaaaagttcgtcttacatggttcaggtgacaaagcatttcattttcattatcaaaatgattttggcggtgtcagggatattgatattccttttgaaggcattattagcaatattagccgccgttatcatgaaactaatagtgatttcacacgtaatgtcatgcgcagctatatgaatgagctgccttgtgcaacctgtcatggttatcgactcaatgatcaagctcttagtgtacgggttggcggcgaagaaggcctaaatattggtcaggtatctgagctatccattgcggatcacttgagtttgctgactcatttggaactgtcagaaaatgaaaaaaccattgcaacacccattgtcaaggaaattaaggatcgtctgactttccttaataatgtgggtcttaattatttgactttatcacgctcagcaggaacgctatcaggaggtgaaagccaacgcattcgtctagcaactcagattggttctaatttaagcggtgtactttatattttggatgaaccttccattggtttacatcaaagagataacgaccgccttatttccagtcttaagaaaatgcgagatttggggaatactttgattgttgtcgaacatgatgaagataccatgatggcagctgattggctggttgatgttggaccgggagcaggtgctttaggtggtgaaattgttgcctcaggcaccccaaagcaagttgctaaaaataaaaagtctattactggacagtatttatctggtaagaaaaaaattcctgtacctttggatcgtcgtaaagggagtggccgtttcattgaaatcaaaggagcagcagaaaacaatctgcaaaacattaatgtcaaatttcctcttggaaaatttattgccgttacaggtgtttcgggttctggtaaatcaacactggttaatagtattttaaaaaaagtcattgctcaaaaactcaatcgtaattctgaaaagccaggcaaatacaagtctatttcaggaattgaacatattgatcgtttaattgacattgatcaaagcccaattggccgtacaccaagatccaatcctgccacctatacaggtgtctttgatgatattcgtgacctttttgctcaaaccaatgaagctaaaattcgcggttataagaagggacgtttttctttcaatgttaaaggcggacgctgcgaagcctgctcaggtgatggcattatcaaaattgaaatgcactttttgccagatgtttatgtgccttgtgaagtctgtcatggaacgcgttataatagtgagactttggaagttcattacaaggacaaaaatattgcagaaattcttaatatgacagtcaatgacgcagcagaattttttgcaccgattcctaaaattgctcgcaagattcgaaccattaaggatgttggtctgggttatgtgactcttggacagccagcgaccactttatcaggtggggaagcgcagcgcatgaagttggcttctgaactgcataaacgctcaacgggtaagagtttttatattcttgatgagcctacaactggtctccatacagatgatattgctagacttcttaaagtcttagagcgttttgttgatgatggcaatactgtgcttgtcattgagcataatttggacgttattaaaacagctgaccatattattgacttgggaccggaaggcggtgttggtggtggtcaagtcatagcgactgggacaccagaacaagtagctgagatgacggaaagctatacaggacagtatttgaagggaagactaaatgaaaaatagattgataacatttgaggaaaagttatctcaatcgccagctgaagctatattggtaactggccaaaaaaacgtttattatctaacagggttttggggaacagcaggaacagtttttatcagtaaaaatcgccgtcttttcctaaccgatgctcgctatagtttgcttgctcggcaaaccatcacagactttgatattatcgaaacacgttcggcacttgcagaaattgttaaaataatcaaagctgataagctttcagtgattggctttgacagtgctattacttattcttattatcaagaattggcagcgacttttgcggattatcgtttacttgctctgacgaattttgtagaagagttacgcatgattaaggatactgatgaaattgaagctattcgtcgtgcctgtcaaatttctgatcgtgcttttgcagatgtcttagattttatcaaaccggggcaaacgtctgagttggatgtggctaattttttagattttcgtatgcgaaaatatggtgcaagcggcctatcctttgaaactattgttgcatcaggttaccgttctgctattcctcatggagtggccggtgataaagtgattcagttgggcgaaatgttgaccatggactttggctgttattataaccactatgtcagtgatatgacacgtactatccatattggtgttccgactgatgaggaacgcactatttatgatattgtcctgaattctaatcgtgctttaattgatatacttaggcccaaaatgacacgtcgtgattatgataaggctgcgcgtgatgtgattgcagcagcaggttatggacaggcttttacacatggcatcggtcatggtattggtctggatattcacgaaataccttattttggtaacgttgaaggcagaattgaatctggtatggttatcacagatgagcctggtatttatctagatggcaagtatggcgttcgcattgaagatgatctccttgtaactaaggatggttgtgaaatgttgaccctagctcctaaagagttaattattttaaagtagatagaaaaatattgtaataaaaccttgctttaccatggtcagtaaagtcgtgattgcagtgtcttaactaatttttttctatttaataagtcgtaaattggtgaaaatctttaaatatttgaaacaatggatcaaaaaatgataatgagaaaggaataaatatgacgaatagactttcttggcaagattattttatggcaaatgcagagttgatttctaaacgttccacctgcaatcgtgcctatgtcggtgctgtattggttaaaaataatcgaattattgcaacgggttacaatggtggtgtggctgatacagacaattgtgatgatgttggacatgaaatggaagatgggcactgtatccgtacagttcacgccgaaatgaatgccttgattcaatgtgctaaggaagggatttctgccaataatacggaaatctatgtcacgcattttccttgcattaattgcactaaggctctcttacaggcaggcgtcaaaaaaattacctataatacagcttatcgtattcatccctttgctattgaactcatgatgcaaaaagaagtggaatacgtacaacatgatgtaccgagagtgaaattaggtgaaaagtaattaaaaaggctcttagagttatataaacgacactctaagagcttttcctattttttatggttttggatttcttccatataccctgctgtaatgatgccagcaggaagagctacaatagcaacaccaatgagagatgaaaacatagtaatgattttaccgatagttgagacagcaaagatatctccatatcccaccgtggttaaagatatagttgcccagtaaatggcgtcaaaaaaactgggaaatgtattgggttctacattaaaaatgattaaagctgatagaaaaatatatcctaaagaaaaaataccaacaataactagagaatctttttgtttttttaaaacattaagaataatagtaatatttttggaatggcgaatgattttaaaaagtcgcagcatccgtgtaaaacgtacaatctttaataatttgagactgttgttccatagtaaaactgaaggagataagcagagtaaatcaataatagcaagtggcgtaaaaggataatacaaaaatgacagttttcccttgtttagatgaaaatctgcagtacaaaatcttaaaagataatcaataagaaaaagcaaggatgtaatgttatcaatattgtatttccattcgctgtcagttttaacagtaagtggcagtaaactaaagctgattgtcaaaatcataaaagcgttgtaacactttccaacagtactatcgttgtcttttgaatcaattatctcatagatcgtttgtctcataatatatcgaactttccttttcactccattatatcatatttagcttttcatcgttttttttaatctaagaaaaatttgagaatacgaggacattatgataaaatgagatgataatattttataaagaggtatagtaaaaaatgattgaagcaagtaagcttaaggctggtatgacttttgaaacaacagacggaaaattaatcagagttcttgaagccagccaccataaaccaggtaaaggcaatacagttatgcgtatgaaattgcgtgatgttcgcacaggttcaacctttgatacaacttatcgtccggaagaaaaatttgaacaagctattatcgaaacacgtcctgctcaatacctttatcaaatggatgacactgcttattttatggacaccgaaaactatgagcagtatgaaattccaatcgttaacattgaaaatgaattaaaatttatccttgagaattcagaagttaaaattcaattctatggttcagaggttatcggcgttaccataccaacaactgttgaattggttgttactgatacgcagccatctatcaaaggggctactgtaacaggttcaggtaaaccagctacacttgaaacaggtcttgttgtcaatgtacctgactttattgaagttggtcagaaattagttattaataccgctgagggaacctacgtttcccgtgcctaaggaaaacagttttggatgaatttattagaaaggacaagtttgatggaaaatgaaatgattggcgaaattgttatttccccacgtgtacttgaagtgattacaggtgttgcgacaacgaaagttgaaggtgttcattcgcttcacaataaaacagtgacggatagtcttagtaaagttgctcacggtcgaggtgtttatctcaaaacagaagaagacggaacagtcagtgcagatatctatgtctacctacaatatgggatcaatgtacctgctgtttccatggaaattcaacgggcagtcaaaacagccgtttatgatatggctgaagtgaatctttctgaagttaatattcatgtggttggcattgtgccggaaaagacacccaaacctgatatgaaaaacctatttgatgaggattttcttgatgactaatgtatttgtggactctaggcgcgatctacgtgaacgtgcttttcaagcacttttttctttggaatttggtggcgataatttaacagcagcaagatttgcttatacttatgataaaaatgaagaggaagaggctgaacttcctctcttcttactgactttaatacaaggtgtatctgattgtagaagggaaatagataagaatatttctaatcatctaaaatctggctggacgctttctcgattgactttgattgataagagcctgttgcgtttaggtttatacgaaattaaatatcataaggaaacaccagaacgtgttgctcttaatgaaattattgaaattgcaaaaaagtattcagatgagaaatccagtaagtttattaatggcgttttaagtcagtttgtgcttgaaagaaaataataaggtctgataaaagaagaggtaagattttaggcttaaatcttacctcttctttttgaatttaaaactaagaattgtatgtctattcttttgcgcaaagttgattaaatattgacattgaactgatgctcattaattaggtaaggacttttaatcaatccacaaaagacaaacctaaataaaccttttgattctaaacactttctcctgataaaagaccaacggggagaatataatctttaggagtatcttggtgatcaattttctttagcaatacgtctaccaaaagatgtgcgatatctttaataggttgcctaatagttgttagataaggatagtagttctcaacaaagtgtgttccatcgtacccaataattttaagttcatggggaatggtaatgtttaactggttagcaattttcattgttaaaatagctgtcatatcatcggacaaaaagataccatcaggtttttcattttggagaattacttttatttccatttctttacgaatgatggacagctctccagatagatgaaaaataggtgcttgagcaaagacggacttaaaacctaattgtcgcagtcctgtcggagaattagaattatcttttccagcgatcataatgggatgttggcagccgtgtttttttaaaagttttgcggccattcgtccgccttcaaaattatcagaagagacgatgggaatattgggtgctaagttacgatcaaaggcaataataggagcagaaactttctcataatcatcaatgccgaggttgtgactactggaaataatgccatcaacctgattagcttctaacatttcgagataatctcgttctttatcgggattattctgactgttacaaataatggctttgtagccatgtttaaacaactctatttctaaatattcaataagttcagaatagaagatgtgactgatattagggaagataagtccgattagcttggcagatttcccctgaaggctgcgagcgagattattaggcttgtatcctagagtcttcatggcagcctgtactttagtaattgttttttcagagagatagccttttcgattaatcacgcgtgaaacggttgttggacttacgccagcgagttttgcgacatctgttaattttgcaaccatagttaatatttcaattcgtagtaattaccgcttggctttccagatttaatcacaataccagtttgtttgtcatttggaaaaacacgtccagtaaaaactttttctcccttattaataaaaatttcaaaaatagatttgtcaacaaaaatattgacaacagtctcttttgcttggatagagcaaaaacgttggcttccaaattctaaggcatattgctcccctgctttagagcgatcgatcagaatggttcccatcttagtatcaactgtaatagctagaccattgcctttattatcagcaaaaaggagcaattcattaactgatgaagagtcaaaagttaactctaattcataagtattattggtttctggcttgtaagtgactgcttctttttcagaacgtaatgaacgaacagcttcaacgggatattgatagagtttaccgtgtttaaggcttagctctttgacgaggctcaaagctccttgatagtcgtatgaatcacttggataatcaatatctggcaacccaatccatgagacagcataaacacggccatcgggagcattgaaagcttgggtagcataacattcaaatccgaagtcaagattttgaatttccgatgcatcaactagggcaggcttttctgtgtcaaacgattgacatactttgtaagtattaggataaatattatgataatctaattcagatttactgagtccctgaggactataaatcaggacaggctgttcgtttataaaaacaagatttgggcactcaatcatatactcagatttacttccgccaaagtctagattaccaacttcttgccaattcttaatatcattatcaacagctttatagagtttgataaatccttttttatctagactttgtgctccaacaatagcataaaattgtcctttataattaaaaatttggggatcgcgaaagtgttcagtaacatcatttggctgtttaataaggacatcagtaaatttttggatattgccttttttatccataaaagcgccgatttgaagtggatgacgaacccaattttcatctcggacatttcctgtataaaagagaaaaagctgatcaccgatttcataggcactgcccgagtatgcaccatggctgtcatgggaagtatcgggataaaggactgtacctgtttctttgaaatggactaagtcttcactttcagtatggatccaagattttaagccgtgagctgctccaaatggccaattttgataaaaaaggttaaattttccattaaaataggaaaaaccgtttggatcattaaggagtcctgttttaggttctatatgatacgttgtatgccaaggagacaaagctacattggttttaatactttttatttcttcttcagtccaatcttgatagcggcgatatctgatattttgaggcaaattcatcgtttatctactcctaataatagtttatctacatactaatatagtaaacgttttctttctaaaaatcaatcttttgttgcaaaaaagaattttatgtaaaacgattgacatattggaaaaaaatgataaaatgaataacgtggaaagcaaaaaaacgctttcaaaacaaaataattattaaggagttttttgcaaatggattatggcaaagtagctagtgaagtcatcacagctgttggtaaagataatcttgtagctgccgctcactgtgcgacacgtcttcgtcttgttttaaaagatgacagtaaagtagatcaaaaagcgttggataaaaatgctgatgtcaagggaacttttaaaacggatggtcaatatcaagttattattggccctggtgatgttaactttgtttatgatgaaattattaaacaaacaggtttaacagaagtctcaacagatgatttgaaaaagattgctgctagtggtaaaaagttcaatcctattatggctttgatcaaactgttgtctgatatctttgtaccaattatccctgccttggtagcaggcggtctcttaatggctttaaataactttttaacttcagaaggtttatttggtactaagtcactggttcaacaattcccgattattaagggttcgtctgacatgattcaattaatgtcagcagcgcctttctggttcttgcccattttagttgggatttcagccgctaaacgttttggtgctaaccaattcttaggagcttcaatcggcatgattatggtcgcaccgggggcagcaaatatcattggtttagcagctaatgctccaatttcaaaggctgctactattggtgcttatacaggattttggaatatttttgggttgcatgttactcaggcaagttatacttatcaagtgattccagtacttgtggctgtatggcttttatctatcttagaaaaatttttccataagagattgccctcagcagttgactttacctttacacctttattgtcagttattattactggatttttgacatttatcgttattggtcctgttatgaaagaagtttctgactggcttacaaatggaatcgtatggctgtatgatacaacgggattcctaggtatgggtgtctttggtgctctgtattcacctgtagttatgactggtctccatcaaagtttcccagctattgaaacccaactcatttcagctttccaaaatggtactggtcatggtgactttatctttgttacagcttcaatggccaatgtcgcacaaggtgcagcaacctttgcaatttacttcttaacaaaagataagaagatgaaaggtctctcatcttcttcaggtgtgtcagcgcttcttggtattacagaacctgctctttttggggtgaatttgaaatatcgtttcccattcttttgtgctctgattggctcagctagtgctgcagcaattgcgggcttacttcaagttgtagcggtctctcttggttcggcaggttttcttggtttcctttctattaaggcaagttctattccattttatgtagtctgtgaattaatcagttttgctatagcttttgcagtaacttatggctatggtaagacgaaggctgttgatgtctttgctgctgaagctgctgtcgaagaagctattgaagaagcgcaagatattccagaagaagctgcttctgcagcaaataaggcacaagttactgatgaagttcttgtggctcctcttgctggtgaagctgttgaattaacctctgttaatgaccctgttttttctagtgaagcaatgggtaaggggattgctatcaaacctagtggtaatacagtttatgcaccagttgatgggactgttccaattgcttttgatactggccatgcttatggcattaaatcagacaatggtgcggagattcttattcatattggtattgatacagtatcaatggaaggtaaaggatttgaacaaaaagttcaagcagatcaaaaagttaaaaaaggtgatgttctcggaacatttgatagcgacaagattgcagaagctggtcttgataatacaacaatgttcattgttactaatacagctgattatgcgtcagttgaaacccttgcctcttcaggaactgttgctgtaggtgatagcttacttgaagttaaaaaataagaaatattatcagaaagaccgtaaggtctttttgactgcttaaaagattcagtaacaatagtattaaagccttttggctaactaatacttgaaacttagcaaattatgatataatgttaagtagtccttaagggcagattaagggtattcaaatccaaaaattgatttggtaagttaagtaaaatataagaggtttattatgtctaaattatatggcagcattgaagctggcggaacaaaatttgtctgtgctgtaggtgatgaaaattttcaaattttagaaaaagttcagttcccaacaacaacaccttatgaaacaatagcaaaaacagttgctttctttaaaaaatttgaagctgatttagccagtgttgccattggttcttttggccctattgatattgatcaaaattcagacacttatggttacattacttcaacaccaaagccaaactgggctaacgttgattttgtcggcttaatttctaaagattttaaaattccattttactttacgacagatgttaattcttctgcttatggggaaacaattgctcgttcaaatgttaaaagtctggtttattatactattggaacaggcattggagcaggggctattcaaaatggcgaattcattggcggtatgggacatacggaagctggacacgtttacatggctccgcatcccaatgatgttcatcatggttttgtaggcacctgtcctttccataaaggctgtttagaaggacttgcagcgggtcctagcttagaggctcgtactggtattcgtggtgagttaattgagcaaaactcagaagtttgggatattcaggcatactacattgctcaggcggctattcaggcgactgtcctttatcgtccgcaagtcattgtatttggcggaggcgttatggcacaagaacatatgctcaatcgggttcgtgaaaaatttacttcacttttgaatgactatcttccagttccaaatgttaaggattatattgtgacaccagctgttgcagaaaatggttcagcaacattgggaaatctcgctttagctaaaaagatagcagcgcgttaattaaaaatgaattggaagattaaagcaccttctaatattcaatattaaactgttagaatttacgtgaaggaaattttcattttatgaggataatgaagtgaatataattactcttgatttcctctgaaactagatagtggtatattgaaaaacagaaaggagaacactatggcagaacctttgtttttacaatcacaaatgcatgaaaaaatctggggcggcaatcggctcagaaaagaatttggttatgacattcctagtgaaacgacgggagaatattgggcgatttctgcgcatcctaatggagtgtctgttgttaaaaatggtgtttataaaggtgtccccttagatgaattatatgcagagcatagagaactgttcggcaatagcaagagttctgtttttccgcttttaactaaaatcttagatgccaacgattggcttagtgttcaagttcatcctgataatgcttatgctttggaacatgaaggtgagttaggaaagacagaatgttggtatgtcatttcagctgatgaaggtgctgaaattatctatggacacgaagctaaatctaaagaagaattgcgtcaaatgattgccgcgggcgattgggatcaccttttgacaaagattcctgttaaagctggggatttcttctatgttcctagtggcactatgcatgccattggtaggggaattatgattttggagacacagcagtcaagtgatacgacctaccgcgtttatgattttgatcgtaaagatgatcaaggacgaaaacgagctcttcacattgaacagtcaattgatgttttgacaattggtaagccggcaaatgcgacgccagcttggttatctctacaaggccttgaaacaacggtcttggtttccagccctttctttactgtctataaatggcagattagtggttctgtcaaaatgcagcagacagctccttaccttttggtgagtgtccttgctggacaaggtcgtattacggttggtttagaacaatatgccttaagaaaaggagatcatcttattcttcctaatactattaaatcttggcaatttgatggtgatttagaaataattgccagccattccaatgaatgttaaagagtctgtttgataataagattccagttgaattaactaagttgtaaagataagataaagctatggggcagaaaagtttctgcctctttattagcttttgaaacggctgataaattcttgaatgtgcctgctatttgtgataaaataaaatgataatactatcgaaaggataacgaatggcaaatattctacgcactatcattgaaaatgataaaggcgaagtaagaaagttaacaaaaatagcaaaaaaagttgaaggttatgctaatgaaatggaggcactttcagacgaagaacttcaggcaaagactgacgaatttaaagaacgctatcaaaatggtgagaccttggatgatttacttcctgaggcttttgctgttgttcgtgaagcctcaaaacgcgttttaggtctctatccttatcgtgtccaaatcatgggcggtgttgtccttcatcatggcgacgttccagaaatgcgcactggtgaggggaagaccttaacggctaccatgcctgtttaccttaatgccttggctggcgagggcgttcatgttgttactgttaatgaatatctagcaacacgtgatgcaactgaaatgggagaattatattcatggttgggactgtctgttggaattaatttagcggccaagtcttctagtgaaaaacgtgaagcttataactgtgatattacttattcaactaatgctgagattggttttgattatcttcgtgacaatatggttgttcgcaaagaaaatatggtacagcggccgcttaattttgctttagttgatgaggtggattctgttctaattgatgaggctagaacgccattaattgtttcaggacctgttagcacagaaaccaatcagctgtatcatcgtgcagatagttttgtaaaaaccctatcagaagatgattatgctattgatacgcctactaaaacgattggcttaaaagattcaggaattgataaagcagaagagtatttccatctagaaaatctttacgacattgataatgtggctttgacccactatattgacaatgctttgcgcgctaactacattatgttacttgatattgattatgtggttagtgaagaacaggaaattctaattgttgaccaatttactggtcgtacaatggaagggcgtcgtttttcggatggtctccaccaagctattgaagcaaaagagggggtaccaattcaggatgagtctaaaaccagtgcttccattacctatcaaaatatgtttcgcatgtataaaaagttagcgggaatgacggggactgcgaagacagaagaagaggaatttcgtgaaatttataatatgcgcattattcccattccaaccaatcgtccggtagcccgtattgatcatcaggacttgctctacccaacacttgaagcaaaatttagagctgttgttgctgatgttaaggaacgccatgaaaagggacagcctgttttggttggtactgttgctgtcgaaacatcagatttgatttcaaaaatgctagttcaagcaggtgttcctcacgaagttcttaatgctaaaaatcactttaaagaagctcagattattatgaatgcgggtcaacgtggtgctgttaccattgccaccaacatggcaggacgcggtactgatattaagttgggcgagggtgtacgtgagctcggcggtctttgtgttattgggacggaacgtcatgaaagccgtcggattgacaatcaattacgtggacgttctggccgtcagggtgatcctggtgagtcacaattctatctctctttagaagatgaattaatgcgtcgttttggttccgagcgtatcaaagcttttcttgatcggtttattgaggaagataatgatgtggtgattaaatcacgcatgctaaccaatcaagttgaatcagctcaaagacgtgttgaaggaaacaactatgatactcgtaagcaagttcttcaatatgatgatgttatgcgtgaacagcgtgagattatctatgctgagcgttacgatgttatcacagcagaacgtgaccttgccccagagattaaggctataattaagcgaacaattgaacgcactgtggactctcatagtcaattggatcgtaaggaaagcctagatgctatccttaactttgctaaaacaaatcttttaccagaagacactatcagtttacatgatatagaagatttaaactatgaagatattaaggatctgctctatgatgcagctcttaaaaattatgaccgtcaaattgctaaacttcgtgatgaagaggctgttcgagagttccagaaagtgttgatcttgatggttgttgataataaatggacagatcatattgatgctctggatcaactgcgcagttcagttggtttacgtggttacgcgcagaataatcctattgttgaatatcaatcagaaggtttcaggatgttccaagatatgattggtgctattgaatttgatgtgacacgtaccatgatgaaggcgcagattcatgaacaagaacgtgagaaagaaactgaaagtaggacgacagctgagcaaaatatttcagcacagtctactatttctccacaggatccaatctttaagaatgtgggccgtaatgataaatgtccatgtggttcaggtaagaagtttaaaaactgccatggacgcaagcgattttaatgaattagaaggataaaaaatgtcttttaaagcaactagtgataaaattaatatagaagaaatgcggagcttgtcaaaattaacaggtgaagctttagcccaaaaggaagcacgtgatcgtgaattggtttccattatcaagggagaggacaaccgtttactcttgattattggtccttgttcatcagataatgaagaagctgttcttgagtatgctaaacgtcttgctaaattgcaggaagaagttaaagatcgcatctttatggtgatgcgtgtttatacggcaaagccacgcactaatggtgatggctacaaaggaatggtccatcaacctaatacaggcgcggctcccagtctgattaacggtattacagctgtacgccatctgcattatcgtgtgattactgaaacgggtattacaacagcagatgaaatgctctatcctgaaaaccttcctttgattgatgatttagtatcctatattgcagttggtgcccgttcagttgaggatcaacaacaccgttttgtagcttcaggcattgatgtgcctactggcatgaaaaatccaacatcaggaaatcttaatatcatgtttaatggtatttatgctgcgcaaaataaacaatcgttccttttcaatggcgaagaagttgaaaccagcggcaatcctacagctcacgttatcttgcgaggcggcgttaatgaatatggaaaaaatattccaaattattactatgacaatgttttagatacgattgatcagtatgaaaagatggggctgcaaaatccttttattgttgttgataccaatcatgataactctggtaaaaactatttggaacaagtaagaattgttcggcaaacccttattaaccgtgactggaatgacaaaatcaataaatatgttcgcggctttatgattgaatcttatctggaagatggtcgtcagaatgagccagaagtttttggcaagtctattacggatccttgtttgggttgggaaaatactaaacaattggttcatgaaatttatgatactttaggaaattaaaatgggtattcatcaaaaaagcaaaaccatagatcttttcacggttaaacaaggcacgcaattaaaaggtcaggatttggctaagaaagaagcacgtgatcgtgaattggtttccattatcaagggagaggacaaccgtttactcttgattattggtccttgttcatcagataatgaagaagctgttcttgagtatgctaaacgtcttgctaaattgcaggaagaagttaaagatcgcatctttatggtgatgcgtgtctatacggcaaagccacgtactaatggtgatggttataaaggcctcattcatcaaccaaatacttctaaattgccagatttgattaatggcattcatgctgttcgtaatttgcattatcgtgtgattactgagacaggattgacaacagcagatgaaatgctttacccttctaatcttgtcttagtagatgatttggtttcttatcatgctgttggtgctcgttcggttgaagatcaggaacatcgctttgtggcttcaggcattgatgtgcctactggcatgaaaaatccaacgtctggtaatctcaaggttatgcttaatgctttacatgcagcacaaaattcacaaaattttatctataatggagcagaagtagaaacagacggcaattccttggctcatgttattttgcgcggaggcagcaatgagcatggtgactatgaacctaattattattatgacgttctcttaaaactgatccaacagtatgaaaatatgaatttaatcaatccctttattgttgttgataccaatcatgataactctggcaaaaattatttggaacaagtaagaattgttcggcaaacccttattaaccgtgactggaatgataaaatcaataagtatgttcgcggctttatgattgaatcttatctagaagatggtcgtcaggataagccagaagtttttggcaagtctattacggatccttgtttgggttgggaaaatactcaacagttgatttatgagatttaccatactctcaaagcaaaataattgttaatatcaaaaaattgaagaaattaagacaaaagtgttctgacttttttactgtatcgtcatttcagtttaacgcagtggctgattggtttttatttaatcccatgaacatcagtttatgtcaatacttaatcaacttttcggaaagcaggacgataaatcgtaatgaaattgcgatttagcgctttttattccactctcatttcaattaaaaatacagcaaagaggttggggaaggatattccagcctcttttagaaagatactatgataataggacacggaattgatttacaagatattgctgctgttcagagagctcatgagagaagttcacgctttgccagcaaagttttaacatttaaagaattagaaattttcactagtctcaaaggtaggcgtcaagtagagtatttagcaggacgttgggctgctaaagaagccttttcaaaggcttatggcagtggcattggttctttgcgctttcaagatttagaaattttggctaataataaaggagcaccgatttttacaaagtctcccttttcgggaaatatttttatcagtatttctcattctaaaaattatgttgaggccagtgttattttggaggagaataacttatgattgctagttaccatcgtccgacgacagctttagttcatttagatcgtatcaaatttaatatcgaacaagttcaacaccatattccaaaatcagccaaaacttttgctgtggttaaagccaatgcctatggacatggtgctgttcaggtggctcaagccattcaaaagcaagttgacggtttttgtgtttctaatttagatgaggccttggaattgcgtcaggctggtctaaatgattttattttaattttgggtgtccttcttcctgaggaagttgctctagctaaaaaagaaaatattactattacagttgctgacttagattggtttgataaagtacagacagaaaacattgatttagctggtctttcagtacatgtaaaagtcgattctggtatgggaagaattggagttcgcagtactgcagaagcgaatcagcttattgcaggtttgcagaaggcgggagcgactgttaatggtatctttacccattttgcaacagcagatgaagcttctactgttaaattcagtcaacagttagagatgtttaccacccttatcagtcaattggattacaaacctcaaacagtacatgcttctaactctgctacaagtatttggcatagtgatacagtaatgaatgctgttcgcctgggaatagtgatgtatggactcaatcctagtggcaatgcacttgaattaccttatgaagtaaagccagcattagagttgacatccgctcttgttcaggtcaaagaagtgcaagctggtgatacagttggctatggtgcgacttatactgccagtcaggctgaaattattggaaccgtccctgttggttacgctgatggttggacaagagatttgcaaggttttcatgttttggtgaatggtcactattgtgagattgtggggcgcgtgtccatggatcaaatcactattcgcttacccaaagcttatcctttaggaaccaaggtcaccttaattggacaggatggtcatgaaacgatttcagcaacagatgtcgctgaaaaacgagagacgattaattatgaagtgctctgtttgatcagtgaccgagttcctcgcaaatatgataaaaagttcagttaagtagctgaacttttttggcttattaacaactcactatagctgataatgagctactgtcatactctttgaatataagttatattccctatgtatccaaaacggatattacccattacagaatcatagagctattttttgttataatataataaaaatcattggagaggtacttatggacttacagtcatcacttgcggttttaaagggattaggtcctaagtctgcagaaaaatttcatagattaggcatttataccattgaggacttgttgctttactatcctttccgttatgaggactttaaggcaaaatctgttttagatttgttagatggtgaaaaagctgttgttactggaaaagtagtgaccccagctaatgtacaatattatgggtttaaacgcaatcgtctatcttttaaaataaaacaagatgaagctgttattgctgtttctttttttaatcagccttatttacaagataaggtggagcttgatcaggatattgctatttttggaaaatgggatcaaaagaagtcagctcttacgggcatgaagattttggctcaagtgacagatgatatgcagccggtttatcatgtggcacaaggaatatcacagtcagctctgattaaggctattcaatccgcttttgaagctggttatttacgctttttatctgaaaatttaccgcaggttttgcttaataaatatcgtttgttagatagacaaacagctacgcgggctatgcattttccgaaagatttggaagaatataaacaagccttgcgccgcatcaaatttgaggaactcttttattttcaactcaatttgcaggttcttaaagcaaataataaatcagaatcaaatggtctgcttattacttatgatcacgatcaagtggctgctaaaatagctgctctgccttttgccttgacgaatgcccaaaaaaggagcttagatgaaattctggcagatatgaagtctggcgctcatatgaatcggcttttacagggagatgtcggttctggtaagacagtcattgccagtcttgctatgtatgcagcctatagtgcaggtctgcagtctgctttgatggttcctacggaaattttagcggaacaacattatgaaagtttaaggactttatttcctgaactttcaattgcacttttgacgtctggaatgaaggctgctgtaagacgttcagccttagcagctatcgctgatggctcagtagatatgattgttggtacccacgctctcattcaagaaggtgttgattaccataaattaggcttagttattacggatgaacaacatcgatttggtgttaagcaaaggcgactgtttagggaaaagggagagaatcctgatgttctcatgatgacagccacacctattcctagaaccttggctattactgcctttggcgaaatggatgtttctcttattgatgaattgccagcaggtcgcaaaccgattgttacacgttgggttaagcatgaacagttagataaagttctgccttgggttaaagaacagctcaagaaaaaagaacaagtctatgtcatttcacctttgattgaggagtctgaaaccttggatttgaaaaatgctgtcgctttagaagaagacttaaaagcttattttgcgtcgtctgctaatattgctcttatgcatggtcgtatgaaaaatgatgaaaaagaagccattatgcaggctttcaaaaagggcagtattgatattctggtttcaacaactgtcattgaagttggggtcaatgtacctaatgctacgattatgattattatggatgccgatcgttttggtcttagtcaattgcatcaattacgaggacgtgtaggacgtggagaaaagcaatcctataccattttagttgctaatcctaaaacggatactgggaaaaatcgcatgcgcattatgacaaaaacaacagatggctttgttttggctgaagaagatttaaaaatgcgtggttcaggagaaatttttggtgttcgtcaatctggcattcctgaatttcaggtggctgatattgtggaagattaccctattttagaagaggctagaaaagtggctagtcaaattgtggccgttaaagattggtgtcaagataaacgatgggcaattcttgtgcaaaatcttaagcaaaaagaaattttggattaaggttttatggtatttaaaatataaatgaattagaaatgtctcgaatctattattgcagatttcatattaaaaaagagcccttcttattcattaattagaaagaggactctcttttatatttgaggatataaagatagtaagattagactgatttttggctctttaaataggatttgaaaagaatacctaacaagactgtgccgcaaataattaaggtcgtattttggacctgcttgctggataattctagagaatagttaaagtgctgatttttagacttgtctgtagcagtaatattaagcttcataattattctccaatctttttttctgttaaccttctatgtattcttttaattcttgccccttgaggccagcgttgagagcaatgagaagtttgagtctggccttaggggcattgagttccctaacaaacatgacacctgcttcttgcagtttgacaccgccaccttggtaagcgtagacaggctctgcaatcccgttaaaacatcgagagacgagagcgacaggaattccttcttgaatgagcttggtaatgctttgagcagcctcgggtggaaggttaccagcacctagagcttcaacaaccaaaccatcaatactgcttttatctaaaatatttaaaagccaatcacccataccagcgtatgccttgataatgggaacagttcctgttaaagattctaggcgaaaacgaacccgcggttcagctgttttgaaaaagagaatatcatgtttcataatgataccaagcggtccatgtgtaggtgtttgaaaagtagaaacattagtagtatgtgttttggtaacgtatttggcagcatgaatttcatcattcatgacgacaaggactcccttgtcagcagcattgtcatagctggcaacacgaagggcagataagtaattgtaaacaccgtcactccctaactcattggaagaacgcatagctccagtcaaaacaatgggaatttgtggcaaaatcatagtgtctaggaagtaagcagtctcttctaaagtgtctgttccatgtgtaataaccacgccatcgtataagccagctgtttctctgattttttgagtcaataaaagcatatgctccactgttatttgcggactgggaatgtttaaaaaatcaatagcattaatctgaatatcatcaagtttgacactggcatggttcatagggttatcactgtctggaacaaccctaccagccttatcagcatgcatagaaatggttcctccagtatgtaaaacaaggattcttttcatgatttttaaaattctttcaaattgtgttatactatattttaacataaattaaagaatatgaaaggtgatattgtggcaattaaggctgtcttttttgatattgatgggacgcttttaaatgatcgaaaacaggttcagaaatcgacacaagatgcaattgcaaatatgaaaaagcaaggcatcttcgttggtgtagcaactggtcggggtccggcttttgtagcgccttttatggaaaatttagggcttgattttgctatcacctataacggtcaatatattttcacgcgcgatcgtattttataccaaaatcagttacccaaatcaacagtttatcgtcttattaaatacgccagtgaacaaaggcgagaaatttctctgggaacgagttctggtcttgttggttctaatatcattaacatggggaccagccgttttggtcaatggatcagtcgtatggttcccaaaaggtggactaaaacgattactcgtagttttaaacatgtagttcgtcgtgttaaaccacagagcttaaatagtttgatgaccattatgcgccagcctatctttcaaattgttttggtggcaactaaggaacaaagtgacattattgctaaaaaattccctcatttgaccattactcgcagtagcccatactctgctgatttaatttctaaaggcatgtccaaaataaagggtgttttatgtgttgccagagaatttgatattgaaatagaagaagtcatggcttttggtgattctgataacgatcttgaaatgttatcaggagttgggataagtgttgctatgggcaatgctactgaacaagtcaaaacgattgcggactatacaactgctagcaataataatgatggtatttctcaggctctagcacattttggtgttatccatcaaaaaacagatagagtcttttcaagtagtgatgacaattttaataaagtcaaagattttcatcaactaatggatggcgaaacctgtgaaatacctagaatttacgacattgttgaaggtgggcaccgttcagcttttaaagctgaagaaattgttgaattcttatatgctacaagtaacggtgataaggaagaatttgctcaagcacttgctagacttcataaagcggttgataaggctgcagagaaagttttgtcaaagccgcatccagaaacgcctttagttggacaagtagatgctttgattgatttattgtatctcacttatggttcctttgtattaatgggagtagaccctaaacccttttttgatacagtacatgaagctaatattggaaagatctttccagatggtaaggcccattttgatccagaaacacataaaattttaaagcctgatgactgggaagagcgctttgcacctgaaccagccatcaaaagagaattggatcgtcaaatccagaaatccttacagcatcgtaaatgaacataagtaaaagggattactaaagatctcaaaaatcatgaacacctatctaacggtggtttggtcaagggttataggccatattaccagctatactggcttttattttgttcaatcctcactgctcttgatttgttgagtctgaagaaaaaattcccaatagtaaaaaagcttaaaaccaagttatcaaaaacattggttttaagcttttttacgttgttgccagttacttaattgattaaaaactgagtttttgcccagcctcttgttttaatcattataatgttttttcgggatcacgaacgaccaataaatcaaccttggcgtggcgaaggatatattcggatgaagaaccgattaaaagtcgttcaaaagcgttgagacctgttgctcccaacataatgaggtcaacatgttctcgctcaggaatttcagtagctaacagaggttttgggtttccaaattcgataatctgcctaaccttttctaggcctctttcacgggcttggttttcataatcatccagaacactgtgagcttcttgttccaacttttcataaatataagcatcaaacgttgcaacactttgaagagctcgtgtatcaacgacatgtgttaaaagcaaattagcatcatttctaagtgcgacactgacacccttttcaaaggcaagctctgattcgtaggagccatcaatggcaactaggatatttttatagctggacataagttgaacctccatctcctcttttattatattgtaacccttttctgaaaaaaagtaaaatgttttcgagactttagttcagctttacttagtttatttacacttggagtaaaggattgtttttaaacctgcgatgaataaaagtaacgattaatacttttatggtatcaccagggataaagacaagattgcttagtaaagacttgtcaataggaaggtgtgattggattgttaaaccaattgctcccatagcatcaataaataagaaaccaatcaaccagatgcaaataaattctactaagaaggaaggattgtctaatttttcagtgatcagaccaatgaagaaggcagcaaaagggtaagctaataaatagcctgctgaaggtcctataaagacggccatattaccatgtcctccagaaagaacaggaagtcctaaagcaactaagagaaggaaaatgaggacagctaaaaatccacgtttaggacctagcaatgctccagctagcatgatacccatattctgcaagataatggggactggaataaaccctaaagggataccgggaataaatccaagtgcaataataatagcaatcatcatggctattagaacagtggactttgttttcatagtgatagctccttttagttaactaaaataaatatattggttaactatattatggcatattttttctttaaaagcaagaattgtacaacgatatatccattccaaaattgcgattttaagtaaaatgcgctacaataatgacactaatgtaacaaagcaatcagcgaggtaaaatgatgaaagaatttaataagtctgctaaacttgaacatgtggcctatgatattcgcggtccagtattagaagaagccgatcgtatgattgctaatggggagaaaatcttacgtcttaatacaggaaatcctgccgcttttggattaacagcacctgatgaggttattcgggatttaattatgaatgcgcgtgagagcgaaggttattcagattcgaagggaatcttttcagctcgtaaagctattatgcaatattgtcagcttaaaaatattcctgatgttgatgttgatgatatctatattggcaatggtgtatcggaaatgattactatgtctatgcaaggacttttagatgacggtgacgaagttttagtccccatgcctgattatccactgtggacggctgctgttagtctggcaggaggtcaggctgttcattatgtctgtgatgaaagttccaattggtatccagatattgataatattaagtctaaaatcacttcaaatacgaaagctcttgtggttatcaatcctaataaccctacaggggctctttatcccaaagatgtattagaagatatcgttgaagttgctcgtcagaatgatttaattatttttgctgatgagatttatgatcgtctggtcatggatggtggggaacatgtggctattgccagtcttgcaccggatcttttttgtgtttctatgaatggtttgtcaaaatcccatcgtattgcaggtttccgtgtaggttggatggttttatctgggcctaaaaaacatgtcaaagattatattgaaggccttaacatgctttcaaatatgcgcctttgttctaatgttctggctcaacaagtgattcaaacatctttgggcggcgttcagtctattgatgaacttcttttgccgggtggccgtatttatgaacagcgtaattttatttataaagctatgaatgaaatccctggaattacagcggtaaaacctcaggcgggactttatattttcccaaaaattgaccgtaatatgtatcggattgatgacgatgagcaatttgttctgaattttctcaaacaggaaaaaatccttcttgttcatggacgcggctttaactggatggaaccagatcatttccgtattgtttatttaccgcgcgttgaagagctctctaagattcaagaaaagatgacacgcttcctagggcaatatcgaaaataaaagggctttcatgaaaattgtcgaatagtaaggaattttctgacaattatttgcattctaaaaaaagctttgatataatagtttcgactatcaaagaaagagtgaattatggctaatttattatcgaaaacgcgacgtattacatccattttacaacgctcggttgagaaccttcaaagtgatttgccttataatacgattgcagatcaattggctgaaattattgattgtaatgcttgtattattgatggtagtggtattattctcggctatgctatgaagtataaaaccaatacagatcgtgttgaagaatttttccaagctaaaaaattacctgatgattatgtaaaatcagccagccgtatttatgatacagaagccaatctgtcggttgaaaatgatttgaccatttttccaattgaatcaaaagatatctatcctgatggcttgacgactattgctcccatctatggcggcggtatgcgtcttggttctcttattatctggcgtaatgataaagaattcaatgatgacgatttgattctaattgagatttcttctactgttgttggaattcaattattgaacttgcagacagaaaatcttgaagaaacaattcgtaagcagactgctattaatatggcgattaataccttgtcttattcagaaatgaaggctgtcgcagctattctcaatgaattagatggcaatgaaggtcgcttgaccgcatcggttattgctgatcgtatcggtattacacgtagcgtgattgttaatgctcttagaaagttagaaagtgccggtattattgaaagtcgttccttaggtatgaaaggtacttatctcaaagttattaatgaaggtatttttgataaattaaaggactatagttaaaatgagtaaagcactgatttcaattgattatacctatgattttgttgccgatgatgggaaattaacagcgggaaagccagctcaagctatctctaaagctattgctcaagtcactcaaaaagcttatgataatggtgactatatctttttcaccattgatggtcatgatgaaggtgatgattttcatcctgaaacgaagctgtttccaccacataatatcaagggtacaagcggacgtgatttgtatggggcgctagctgatttctatcagaagcatgaaaacgataaacgtgtcttttggatggacaagcgccattattctgccttttcgggaacggatttggatattcgcctgcgagagcgtcgtgttgatactgtggttctgacgggtgttttgacagatatttgtgttttgcatacagctattgatgcttataatcttggttatcaaattgaggtggttcagtcagcggttgcttccctaagtcaagaaaatcatcaatttgcgctaaaccacttgcaaaatgtgcttggtgcaactataatagaatagttaacaatcaaaaattaaatatgaagagaagtagagtaagccttgcgacttgtccagagagcatccgctgctgagagtgatgtctagtcaaaagagcctgaagaacatgctttaatctcctatcttaaatataggcgttttattcacgttacgaatcaagaggttatcaatttattgatgacaaataacagtggcaccacggtcttcgtctgtttagatgaaggtggtgctttttattttacgaagaagaggacatcatgaaagaattatttattggaaattatggattggaacaagttgggcaaaaagtaacagctaagggctgggttgccaatatcagaaatcatgggaaactggctttcattgaacttcgagatcgtgaaggtctgctgcaagtgtttgtagacagcgctgttgctgactttgataagcttcatgatctgcataaggaaagtattttagccgtaacaggtgagattgtggcacgtgatgagcgttttgtgaatcctcatattaaatccggacaggttgaattgcgagcggaaacaatcgaaatcattgccagcagtaaactcttgccttttgaattggacaatcacgctcatgctggtgaagatattcgccagaaataccgttatttagatttgcgccgtgagaagatgacagctaatttgaagctgcgtcatcaagttaccaaagccattcgtgattatctcaatcaggctgacttcattgatgtcgagacaccttatttaaccaagtcaacgccagaaggagcgcgtgacttcttggtaccatcacgtgtctttaaaaatcaattctatgctttgccacagagtccacagatgttgaagcaacttttgatgggagctggtcttgagcgttattatcaaattgtacgttgtttccgtgatgaagacttacgtggtgatcgccagcctgaatttactcaggtcgatttggaaatgagctttgttagtgaagaagatgttcgcaatcttgttgaaggcatgcttaaggctgttgttaaggcgagcaaaggtattgaattgacggaagcctttccgataatttcttatgcacaagccatgcgtcgttttggttctgataagccagatacccgttttgctatggaacttaaggatttaacagaactttccagaggaaatacttctctcttcctacaaaaaggtcttaaaaaagaaaatggcgtggttatgggaatctgtgctaagaatgctgctaaggccttcacaaatcgtcaaatggctacgctgaagcaattggtcatggattttggagttgctggttttgcaactgcaacaatagaaaagggtcaggtgacaggatctttgaagtctacttttaaagatcataatacagaattgttggaactttttgaagctgaagatggcgatatgattttctttgtaacgggttctctcaaacgtgttcaagaagccttgggtggtcttcgtgtcagattggctaaggatttagagttgattgataacgataaactgaatttcctttgggttgttgattggccacttttggaatggaatgaggatttgaatcgttatcaagccatgcaccatcctttcactcaaggagcctttgaagatggtagtgattggaaagaaaatccagagaaaatgatgagtcgtgcctacgatattgttttaaatggttatgaaatcggcggcggcagtctgcgtattcataaacgtagtgctcaagaagcgatgtttgaattgcttggcatgaagaaagaagattatgagcgagactttggttttttcctagaggctttggaatatggtttcccaccccatggaggtctagctttgggacttgatcgtttagtaatgattctagcagaagaagaaaatatccgcgaagtgattgcctttcctaaaaatggtcaaggtgctgatgccatgcttgagagtccaagtttggttgcagaccagcagctggcagaattgcgcctagctttgcgtgactaagtagctgaatttgtggtaaaataagacagttagtgaaatatatagagttttgttttaattaacataggtgattagctttgttaagcataaacaaaatgattagactagaaaaataaggagaaaagaatgaaaatttccgaagaagaagttcgccatgtggctaacctttctaagttaaaattctcagatgatgaaacaacagaatttgcaacaactttgactaagattgttgatatggtggaattactaaatgaagttgatacgcaaggtgttccttttacatcaaatgtcgcagataatattaattatatgcgagaagatgtttctgtagcaggttgggatcgtgaacaactctttaaaaatgttcctgaacacgaagatggtctgattaaagtgccagctatcattgatgaaggaggagatgcctaatgacttttaatcataaatccattgatgaattgcatgaccttcttgttaataaggaagtttcagcgctagaattaaccaaggctactttagaagatatcaaggaacgtgaagaaacagtaggttcttttatcactgtaacacaagaagaagcattagcacaggctgctgctattgatgaaaagggaattgatgcagataatgttatgtcggggattcctttggcagtcaaggacaatatttcgaccaaaaatatcttaacaactgctgcctcaaaaatgctttataactataaacctatctttgatgccacttctgttgaaaagctttatggcagggatatgattattgtcggtaaaaccaatatggatgaatttgccatgggtggttctactgaaaactcctatttcaagttgactaaaaatgcttggaatcaagagaaagtagctggtggttcttcaggcggttctgcaacagcagtcgcttctggtcaggtacgtttgtcacttggttctgatacaggtggttctattcgtcaacctgctgcttttaatggtgtcgttggaatcaagccaacttacggtcgtgtatcacgttttggtttgattgcttttggttcttcattggatcaaattgggccattctcacaaacggttaaagaaaatgcccaattgcttaatgttatttcaggaaatgataagaaagattcaacctcttcacaagtaaaagtacctgattttacgcagttcattggtaaggacatcaagggaatgaaaattgcccttcctaaagaatatattggtcaaggaattgatgaaaaggttaaggaaacgattctgaaagctgctaagcatctagaaagcttaggtgctatcgttgaggaagtcagtctgccacacagtaaatacggtgttgccgtttactatattattgcttcatcggaagcctcttcaaacttgcaacgtttcgatggcattcgctatggctatcgcaccgacgattacgaaaatctggatgatgtctatgtcaacacccgcagcgaaggctttggtgaagaagtgaagcgtcgtattatgctgggaactttcagtctttcttcaggttattatgatgcctatttcaagaaagctggtcaagtacgaacacttatcatggaagatttcaagaaggtttttgccaactacgatttaattttaggtccaacagcaccaactgtggcttatgacttggactctcaacaccaagatcctgttgctatgtatttagctgacttgttaactattccagtaaacttagctggtctgccaggcatctctatacctgctggttttgtggaaggattgcctgttggtatgcaactaattggaaaaccatttgctgagcaaaccatctatcaagcagcggcagcttttgaagcaagtacggattatcataaacaacaaccagttatttttggaggtggcaactaatgaattttgaaactatcattggattagaagtccatgttgaattaaaaacaaattctaaaattttttcacctgcaccagcacattttggagaggatccaaatgctaatacgaatatcgttgactggtcatttccaggtgtcttgcctgttatgaataagggtgttattgattatggcatcaaggctgcacttgctctcaatatggacattcaccaacgcatgcactttgaccgcaagaattatttttatcctgacaatcccaaagcctaccaaatttcacaatttgatgaacctatcggctacaacggttggattgaaattgaattagaagatggcagcaccaagaaaattcgcattgaacgcgctcacttggaagaagatgctgggaaaaatacgcacggtgttgatggttattcttatgttgacctcaaccgtcaaggggtccctttgattgaaatcgtatcagaagctgatatgcgttcacctgaggaagcttatgcttatttaacagcccttaaagaaattatccaatacacaggaatttcagatgtcaaaatggaagaaggatccatgcgggtggatgccaacatttctatccgtccttatggacaggaatcatttggtgtcaagactgagttgaaaaacttgaactctttcaattttgttcgtcgcggtttggcctatgaagaaaaacgtcaggcagaagtccttcgttctggaggtcaaattcagcaagaaacacgccgttatgatgaagcaacaggggaaaccttgttaatgcgtgtcaaagaaggttcagcagattatcgctacttcccagaaccagatctaccaatttttgaaattgaagatgagtggattgaaaaagttcgagcagaattaccagcctttccaaaagaacgccgtgctaagtatgtcaataatttaggtctatcagcttatgatgctgcccaactgaccaactcaaaagcgatttcagatttctttgaagcagctcttgctcaaggtgcagatgcgaaaacagcttctaattggttgcaaggagacatcgctcaatatctcaatgctgaaaaccaaaccattgatcaaatcggtttgacacctgaaaatttgactgaaacgcttcagttagtagcagatggaaccatttcttctaaaattgcgaagaaggtcttcgttcatttagctaaaaatggcggttctgccaaagaatatgtcaaatcagcaggtcttattcaaatctctgatccagcacagcttctgccaatcatccaagaagtctttgccaataacgaaaaagctttgaatgactacaaaggcggcaacaaaaatgcagccaaatctctagttggtcaaattatgaaagccacaagaggacaagccaacccacaagtcgcgcaaaaattgcttaatgaagaattggcaaaattataataaactaaaaaatcggtagcaaccgatttttttgctgcaaaattatgctaaaataaagaaaaatgtattttgggagtaagtatgaagaaatcgtttaagggaacggttcttgttgttctagcagccattgcttggggcatatcaggagtgtcgggccaatttttaatgaagcagggcatttctgtctatttattgacttctttgcgtttattgatatcagggctacttttaattggagttgtcatttggcaacagcctcagcagatcaaagctattctagaggataaaaagatgttagtagggatttttggttttagcatttgtggactgcttctgaatcaatttagttatttgcaggctattcattatactaatgctggaacggcaactgtcctacaatatatggcacctgttttagttttgacaattatttgttttaagaatcgcagtttgccaactataggtgaacttgctgccattcttttagctattttgggaacatttatcatagctacacacggacagttaggcaatttggctctaaccccagctggtctcttttggggactcttttctgctgtgacttatactctgtatatgtttcttcccattaaactcattcaagaatggggcagtctcttagttattggattgggtatgctgctgggaggtctggtatttagtcttgtctctcagtcttggcaatacaatcctcaatttcaggcaaataacctgttggcttatgttggtttaatcattgttggcagtgtttttgcttacacttcttttttgaagggagtcagtctgattggtgctgtaaaaggcagccttctggcttctattgaaccagtggcagcagtctttttctcagttactcttatgaaagaaattttttatcccatcgatttcctaggcatgctgttgattatactagccgttcttatcatttctatcagagacttattagcaaccaataaagaaaaaatatgagttccatctcagattttttgcatgaacctatttgattaaggtttggtttgtaaatctttgataatagtttgagctattagggtatttccgccagcagtttgagcaatcttttgaaaatgcaagatagtatttttgtaagaagaatctttaagaattgtatgggctgcttgtttgatttcttgaggatttaagttgtgacgtttaaggtattttcctaaatgtaaatcagaaacttgctgggcgactcgaggctgatcattgccaacaggaatcactagcatagggcagccataatagatagcttcattaacactgttcatgccaccatgagtaagaaaaagtgaagctctttccaagatttggagttgaggaacgaaagaataaagatgaacattggctggcattgttcctagttgttcttttttaatcctatttccaagtgaaataatgatagagtagggctcattttcaaaagccttgatacattttttaaaaaaggagacagagcgattgaggagagtacctaatgaaatataaacaatcggatttttaaaaggtgtgaaatcaaaaggcggctcgacaggacgattgatggaaggcccaacgtattgatagtgattttcatcaaacgtatcagcatcaatttgaaattcccgtactgtatacgtgaaattgagttcgggagtattaagactgatttccttagcaagatcatcataagccagctgaaaggttctttgcaattttcttgataaaagatggcgcagaaaagtgaagcgaaaaatactggtcagataaaagccacctgttttcccaaattctgacagaattttttcatttaaggaaaaagttgagaatagccgataagctggaatattcagtctgtccgccagagcttttcctggaaagaatagcatttcataaagcaaacaatcgtaatctttacccatacgtaagacagtctgataggcagctgaccagcttttaacgttcttttgcctttctgataacgaatctggataatggtcataaggaacaaaatgtgcacctgttctttcaatcttactttgccaatcaggggcattaatataggtgacattatgacctagctggactaaaatttgagcaagttccaaagtcggattggtatggccggaaaaaggaagattaaccattaaaatgttatagtgtgtttttttcatcatagtgttttaatccatttttaagtttgtttttatcgttttcatctaaaagaggaaggtcgaatttttccagtaaaagtgcgataaaatcaatcctttgacaagctgtctgataatcaaagtcaacaatagaaggatccagccaaatatcaaacagtaaaacaaagatttctgaaagttctttagagtactgacagttaagctttttttcttttatttcctgctggatgatagcttcaatgtattgggcaaccaccgttagagaattttttaacgtttctaaaagggcaaaagggagtttctcagcccaatgaagtctggttaattctgttaatgaaggattttcaaaaaaataagttaggatacccttaaatttttgttgggcatttaactgattattgctgatgagagcatctagacattgccttagattgtccatttccagactgatttgaaaatttagaatctcttgcttactggaaaaatgatgatagatagcgccttttgaacgtccgctcttgtggacaatttcccgcattgttgtctcttcataacccttttgcaagaataatgtcatcgctgtttgggcaattctctttttagataattgcgtttttgcttcttgtttcaacgtgtagtcccttctttttcataaaacagaccaacagtctgtttttagattatagtaacgctttagattggaaatgtcaaacttaataatctaagaaataaacttttctataatccttggaacgaaatgtatatgaaacaatttaaatatatagtaaaaattctaaaaacattatataatagacgagtgaaatagaaataaaaaagatttggagaataagtatgaaaaagttgtctttaggacttatattggcagtagtagtgattcttttagcttttttaaatccttatttggctggggttattggtattgctggtgtttggtttttaaaggattaggagaatagaaatagaatgaagatgttaaagaaaattttgggttgtaaaatctatatttggtttgctgcactgatagctttggtgggattgtttttttattggtatggtatgaatcaaaacaataataaatctgctgatagttctcaatcttattcaatggtgaaatatattgaagcgacaaatgaaacggttttcttgaatgtagggattgaaaaagtagatgcactttctaatgcgactaaagtacttgggataacgattccttactcgcaaaagaaagcaattatcattttgaattatgaagcaaaactagggattaaaagggctgtttcaataaataaaacgagagagaataattttgaaattaaaattcctaaatttgaagttattggtgtaaaattggatgataagcatccatataaactgtacaatagaagtggcgaattattaagcggctctacagaagaagtagatacgggtaaagctgccacatcgttgctaactaataaagaacagaaaaaatatttgaaacagtattctgatatgattaaaaagtctgctgaagatcattataaagttttatttaaatctatttatcctgatgttaagttgacctttgtttacgaaaattaacgatttaagcccttgctatcaagcagataacagggctttttcttcctcgccttattctttattttatgttaaaataaaaggtaatattttatttggagaagtaagtgagtatcgaaaattatcgacccgatttcgtggtagaagccgtttatgatttaacccctgatagcctgcgaaagcacggtattaaagccgttcttgtcgatttggacaataccttaattgcttggaatcatcctgatggcacaccccaattgcgggattggctggatagtatgactgaagcagatatgccggtagtcgtggtatctaacaatagttatacacgtgtcaaacgggctgtcaaaggttttcatgtagattttgtcagtcgggctctgaaacctttttctcgcggcattaatatagcagtgaatcgctatggcttttctaaagatgaagttgttatggtgggcgatcagctaatgacggatattcgtgcggcacaccgtgctggtgttaaaagtattttggttaaacctttagttaagtcagatgcttggaatactaagtttaaccgtgcgcgtgagcgtcgtgtttggaaaaaaatagaagacaaatatggtgcttttgtctataaaaaggaaatttaagtggaagaattattttgtatcggctgtggagcgcaaattcaaacgacagccaaagagcaagctggctatacaccaaagtcagccttggaaaaaggacttgaaagcgggaaaatatactgccaacgctgttttagactgcgtcattataacgaaatcacagatgtgcatatttcagatgatgattttttaaagtttctccatgaagtgggggacagcaaggctcttgttgttaatgtgattgatatttttgattttaatggctccattataccgggattgcagcgttttatctctagcagtgatttgcttttagtgggaaataaagcggacattctccccaaatcagtcaaatctgggaaaataacacagtggctgatggagcgtgcgcatgaagaagggttgcggccgcttgatcttatcttaaccagtgcccagaataaatgggcgataaaagaattaattgctaagattgaagaacttcgtcagggacgggatgtctatgttgttggtgttactaatgttgggaaatcaactcttatcaatgccattattcaggaaatcactggcgataaaaatattatcacaacatcgcgttttccgggaacgaccctagataagattgaaattcctctgaatgatggttcctatatttttgatacgccggggattatccaccgtcatcagatggctcattacttatcagacaaggctctcaagtatatcagtcctaaaaaagaaatcaagcctaaaacttaccagctcaatcctgaacagacgctctttttaggcggtttggctcgttttgattatgtaacgggcgataagcaaggctttacagcttattttgataataatctcaaattacacagaactaagttggctggagcggatactttctatgacaaacatattggcagccttttgacgccgccagataagaaggaaatggcagcctttcccaaattggtaaggcatgaatttacgataaaagaaaagacagatcttgttttttcaggtttgggttggattcgcatcaatggcagagccaaaattgctgcttgggcacctgaaggggttgctgttgtgacaagaaaagccttaatttgacttatctagatgttaggcttataaccctgccattttaacaaaaaggaataaagaatatgcttacaagtaaacagcgtgcctttttaaaatcggaggcacattctctgaaacccattgtgcagattgggaaaaatggtctcaacgaccaaatcaaaaccagcgttagaaatgctcttgatgcacgtgaattgattaaagtaactcttttgcagaacactgatgaggatattcacgaagtggctgaaattttggaagatgagattggtttggagaccgtccttaaaattggacgcattttgattctttataaggagtccagtcgtaaggacaatcggaaactttcggtcaaggttaaagcgatctaaaaaatgattgtgataatggaggcaagatggctttagaactgttaacaccttttactaaggtggagttggaagaagaaagaaaagataaaaatcgaaaacaaattggtatcttaggcgggaattttaatccggttcataatgctcatctgttggtagcggatcaagttcgtcagcaactgggattggatgaggtcttgctgatgccagaatacaaaccaccacacgttgataagaaggcaactatcgatgaaaaacatcggctcaagatgctggagttagctattaaaggtattgaaggcttggctattgaaactattgagctcaaacgtaaaggagtctcttatacctacgacaccatgaaagatttgattgaacaaaatcctgatgttgattattattttattattggtgccgatatggtagactatttgcctaagtggcacaagattgacgagctgattcagatggtacaatttgttggcgtacagcgtcctaaatataaggctggaacttcttatcctgtcatttgggtagatgtaccgcttatggatatttcctctagtatgattcgagatttcatccgtaagaatagaaaaccgaattttcttttaccaaaactagttcttgactatattgagaaagaaggactttatcaatgacctatgaagcttatattgccatgaatcgagacgatttactgaaaaaacttaaatcggtagttcctaaaaagcgtttaagacacatgataggtgtcgaaaaagctagtatttatttagctgaaatcaatggttatgacactgagaaagctggtttagcagggcttttgcatgattatgccaagaaattatctgatcaggaatttttacaactcattgataagtatcatcttgattcgcaattaaaaaattggggcaataatgtctggcatggaatggttggcatttataaaattcaagaagatttgggcttgcaagatcaagaaattctgcgtgccattgaaattcatacggtaggttctagtcacatgtcaactttggataagattgtatatgtcgctgattatatcgaatgcaaccgtgatttttcgggggtggacaaggcgcgtgccattgcagaaacgtcgttgaataaggctgttgcttatgagacagctaggacagttgcatttttggctagtaaaggtttgaaaatttatccacaaactctagaaacttataatgcttatgtggactatttaagagaggattaaatgaaggaaaaaaaattactggaattaatcgttaaggccgctgatgaaaagcgggctgaagatattgttgtgatggatttgcaggggctgacaaccttgacagattactttgttattatgcatgcgactaatagtcgtcaactggaagctattgctgaaaatattcgtgagaaggtgcttaaagctggaggcaatgctagccatattgaaggtgattctaaaggtggttgggtgctgcttgacctcaatgatgttgttgtccatatcttctcagaggatgagcgctaccattacaatctcgaaaaactttggcatgaagcaccaatagtggacatgtcgaaatacttagcataaaagacaaccttgccagatggcaaggtttttgaaaataagagaaaatttagcaagtttctaacagcatgttttgttgcaagaaaaattgtaagaaaggatagaaggcgagcaaagcgagccttaacgatagttgctgttgtggtgaaaagatagtaataattatctgttgctatcaaaggaaaccgaaagtttaagtctttcggtttaggaatgaaaccatgtagtaggtcgcttccaacttcaccgcttaaagtcactatcaaaaaacaaaagatgaaaaattatcaaaaattcgctgctgtctatgacagtatcatggatgattcactttatgacaaatggactgatttttcactccgccattttcccaagaataagaaaaaacttttagagttagcttgtgggacaggtattcagtctatccgcttcaagcaggctggattcgatgtgacgggtctggatctaagtgcagacatgttggacttagctaagaagcgagcccaatctgctcatctagatattccatttattcagggcaatatgttggatttatcctccgttggcaagtttgatttggtgacttgctattcggattccctttgttatatggaagatgaagtggctgtaggtgatgtttttgagcaggtctatgctcatctaaatagcggagggacttttatctttgatgtgcattcgacctatcagaccgatgagatttttccgggttacgcttaccatgaaaatacggaaaactttgccatggtttgggatacttatagagatgaggcaccacattctgttgtccatgaattaaccttcttcattcaagataatgatggtcgttttacccgctatgatgaggttcacgaagagcgcacctatgacctgttgacctatgatattttgctggaacaggtaggtttcaaaactgtcaaggtttacgcagattttacagatgacattcctaaagaagatagtaaacgttggttttttgtagcagaaaaaagagagaaataacctataaattatttattatttgtgttaaggctgggattagcagggatagcccctgttggcatgattttgctgaacaccatgcaggcagcaagtttgttcactaaaaaagtctatctttttggtggcatagttctttttgagacagccttgttaggttttgtttcatcggtgatattaggtaatggcatatcgaatatagcacaaacccttggtcaactccccaatatagcatgggtttggatttatatggtgcttattgctgccttgcttgaggaatcaaacgtctgttgacagtagaagaattaaacaaacagtcaaaatagcccaaaaagccgaaagggcatctatgcaacagcaattttcatgatttatacagccattgtggagcccacatttttagctgtgctggccttgtctggtcaagtcaacaatatccccttatcgctactatataagctcatctgggtgcttaagccaaagcccgctcttcttgttgattttggctgttatgtccaacaaacaccacctatttattgataaatttaatgctttctacgaaacagacagcctatctagtctggaataacatgtctcatctttctatctgcgcttgtattgctgatagacttatctttttattgacttttagataactggttttcaggataaaatggaggaaatctcatgaccacaacaggcattatcgcagaatttaatcctttccacaatgggcataagtatttgctggatcaggcacatgggctgaagattgttgctatgtccggtaatttcgtccagcgcggcgagcctgccatcattgataagtggacacgagcgcaaatggcgctggaaaatggcgctgaccttgtggttgaactgccttttctggttgctgtccagtcggccgattattttgccagcggagcagtggatattttagccaaactcggcattgatacccttgctttcggcacagaaactgctctggactataatggtttgtctactatttatgggaaaatggcagagcagatgagtgaattcctcacgacgctgcctgagaagctcagctatccccaaaaaacgcagctcatgtgggaaaaatttgcaggggttcagttcacaggagacactccaaatcatattcttgctttggcctacgccaaggcttgcgcaggaagaaatatacgattacggcccatccaacggcgaggtgcagattatcattctacagaaaaaactgtggcttacgcttccgcaaccagtttacgacatcaccggcaggatccagcctttgtggctaaaagcatgcccaatgcaaacctttttcaaacgagtccgcaagtgacttgggaagactattttactctacttcagtatcaagtgttgacacaacccgatttaacccagcttttccaagtcaatgaagaattggctatccgcatcaaaaaagctatccgacaagtcacaagctttgatcaattagtagaaactgtcgctaccaaacgctacaccaaagcgcgcgtgcgccgcatcttaatctatatcttaatcggtgcgcgtgaaactagcctaccgcaggacgttcacatccttggtttcacagccgctggtcgtacgcacctatctcatattaaaaacaagacccgaatcatctcccgaatcgggtctcaaccgtgggacgccctcactcaacaagcagaccaagtctaccagctcggaaatccaaaaatagccgaacaaacatggggacgcgtgccaattagaatagataacacagtctagtgtaagacgagaaatacagaaaaattatcttaaaaaataatattccccttgactctcacgcagcgttataggctatactaacattatgagaggagattcaatcatgaaaacagtaaaagaaatgagcaggctgtcaggtgttagtgtgcgcacacttcattattatgatgaaatcaatttgctgacacctagttttattgccaataatggctatcgctattatgatgataaagcctttgagcgcttgcaggaaattttgctttttcgtgaactggaatttcctctcaaaacaatcaaagagattgtagggaatacagcttatgacagggattttgctttacaggaacaaataaagcttttagaaatgaagaaagcacacctggagaaagtcatcaagcatgctaaatccctgcaagaaaaaggagatagttatatgaaatttgatgcttatgacaaaacggagctgaaagctttacaggaagaagctaagcaaagatggggaaaaactgcggcttatcagaaatttgcagcaaaaatgtcagataaagattttgctcacatcagctcagaaatgtctgctattatgtctgcttttggtcggttaaaacaattaccggttgaccatgctgaagtacagcagcaggtagagagcttgagaaactatattagtcagaatttttatgcttgtaataaggatatattggctagattgggcaaaatgtatactgcggacaatcgttttagtcaaacgattgatactgcaggcggtcagggaacggcagcctttgtagcacaagctatcacagcttactgtcggtaaaagatgttgaggacttatttaaataaatcatttgcctttcttctattttacacacttctgtcaaagtgctataatattagggattatgaatttagctctgctatgttcaagaaactaaaaaaactaatttaagaggagaactcccatgggacgtaaatgggctaatattgtcgctaaaaaaactgctaaagacggtgcaaactctaaagtttatgctaagtttggtgtcgaaatctatgtggctgccaagcaaggggagccagatccagaatcaaattcagctttgaaatttgttttggaacgtgctaaacaagcacaggttccaaaacatgttattgataaggctattgataaggctaaaggaaatacggatgaaactttcgtggaaggtcgttatgaaggctttgggccaaacggttccatgattattgtggataccttaacttcaaatgttaaccgtacagcagccaatcttcggactgcttttggtaagaatggcgggaatatgggagcagctggatctgtttcttatatgtttgataaaaaaggtgttattgtctttgcaggtgacgatgcggacagtatctttgaacaattgcttgaggctgatattgatgttgaagatgttgaagcggaagacggttctgtaacagtttatactgctccaacagaccttcacagaggtattgaagcgcttcgtgctggcggtgttgcagaatttcaagtgaccgaacttgaaatgattcctcagtctgaagtgacacttgaaggggaagatttggaaacctttgaaaaacttattgatgctcttgaagacgatgacgatgtgcaaaaagtttatcacaatgttgatggcttataagcaaaaagaaaccttgcaaattttgtgaggtttttttcttaccttcaaattaaagctggaacataggtcatttagtcgtataaagtgtagaagaaatgctgtcagtggtctgaaaatttacagacaggctaattgaaaatttaaacaaaaaaagctatgataagactattaaaaaagaagtgagggaaattcatgtcacattttgcagaagcgattaaacattttaacgctctaacagcacaagaagcacaggaaaaaattgatagtggagaaaagtttattcttttcattggacgttcaacttgtccttactgtcagcgttttgctcctaagttgagtcaggttgctgcagatacgggtcagacagtcgcttttttaaatagtgaaaatcaagatgatttaacagctgttcaagctttccgtgagaaatatcatgttcagacagtaccggggcttttagttgctcaagcaggacaagtcaaagttgtttgtgattcatcgctttcacaagaggctattgctgattttatcgctcaataggtaggctttagactgtttggctattttggtctcttaatgttatcgtccttttaaatttttgaatttttataaggcttcgttttgggcagaaactgattttgcacttgctcttagcatctaattttgttatagtatgtgatggctttattattaaagagatgaggagaatatactatgtcttatactacaattatcatgtttgttgttttgattggagccatttttttgatgcagcgttcccaaaagaaacaagctcaagagcggcaaaatcaattaaatgctattgctaaaggagatgaagttgtcaccattggcggtatgtacgctgttgttgatgaagtggacaatgataataaaaagattgttcttgacgttgacggtgtcttcttgccttttgaactaacggcaattaagcgcgttgtaacaaaagaaagtcagactgtagaaactgatcaaacgccggaagaagcaactgaaattattgaaacttcaaaaatagaagaaaaaggttcagattctaaggaaacagcaagtactgaatctgccattgaagaataattataaacctcaatcgttgtgattggggcttttttcaactggaataaaattcgttcataaatcttaaattatggtaaaatagatctgatagtattttttaaggaaaaaataatgtttacattaagacgaaaaaaacaagatataaaattatctaaaatcccagctcatatcggtatcattatggatggcaatggacgctgggctaagaaacgaatgaaaccaagggtatttggacataaggctggtatggatgcccttcaagatgtgacgatagcggcatcggaacttggagtcaaaattttaacagtttatgctttttcaacggaaaattgggctcgtcctcaagaagaggttaaatttatcatgaatttacctgtagagttctttgataagtatgttcctaagctgcataaaaataatgttcgtattttagtgattggcgataaggaagaactgccggcagcaactttagatgctctggaacgcgctagagaactgactaaacataattctggacttattttaaattttgctttgaattatggcggtcgtgctgaaattgttgatgctgtaaagttgattgctcaagatgttttagatgctcggtttaaccctggtgatattacagaagggctcattgctgattacttgatgacaagcaatcttccttacctttaccgtgatcccgatttgattattagaacgagtggtgagctgcgtcttagtaactttttaccgtggcaggctgcttatagtgagctttattttacagatacactttggccagattttgataaaaaagctttgtatttagctattgaagaatttaaccatcgccatcgtcgctttggtggtgtttagaaagaggatttatcatgcagaaacgtgttctttttgggggagtggctctggctatttttctccctttcctatttttgggaggtctcttttttcagctttttgttggtgttctagccatgattggcgtatctgaactgttgaaaatgaaggcgttagaaattttttcatttgaaggtattttagctatgcttgcggcttttgtgctgactattcctttagagaactacctgacttttttaccgattgatggcagctttagtgcttttggtctcgttatctttttgattttagcaggaacggtcttaaatactaatcgctattctttcgaagatgctgcttttcctattgcttccagtctttatgttgggattggttttcaaaatctcgttaatgctcgcatttctggacttgataaagtttttctagccctttttatcgtttgggcgactgatattggagcttatatgattggtcggcagtttggtcaacgtaaattgatgccggcagtttctcctaacaagactattgaaggcagcttaggaggaattttgtcggcagttgtcattgcttttatctttatgttgtttgataagaatgtttacgcaccgcatcacttcttagtcatgcttattttggttgctctctttagtatctttgcccaatttggtgatctagttgaaagttcaattaaacgacattttggtgttaaggattctggcaaactcataccgggtcacggaggtattttagaccgttttgacagtatgatttttgtttttccaatcatgcacttctttggtttgttctaaaaggaggaggaaagaatgtcaggactaatagcttttattattatctttggaattatagttcttgtccatgaatttggtcatttctattttgctagaaaatcaggaattttggttcgggaatttgccattggtatgggaccaaaaatttttgcacatcaaggaaaagacggtacagcttataccattcgaattttgcctttaggtggctatgtccgtatggctggctggggagaagatactagcgaaattaaaacagggatacctgccgctttgacgcttaataaagcaggtgtggtcactcgtattgacctttctgacaggcaagtggacaagacggccttgcctataaatgtgacagcttatgatttagaagacaaattagagattacaggacgcgttcttgaagaaactaagacttatccagtggatcatgatgcaacaattgttgaagaggatggaacagaaattcgcattgcaccgctagatgtgcaatatcaaaaggctagtatttggggacgtttaatcactaattttgcaggtcccatgaataactttattttaggtatttttgtttttgccctcttgatttttgtgcaaggcggtgttcaggattcttcaagcaatcatgtgcgtgtgactcctaacagtgctgtagctaagctcggacttaagaataatgatcaaattttacaaattgggaaaaacaaagttcataattggaatgatctcactaatgcggttgctaagtcaactagtaatttgaaaaagaaagaagctattccagttaaggctaagactcaaggaagcgtaaaaactttaaaagtcatccctaaaaaagttaatgggaattacgttattggtgtcatgccaagtatgaaaacaggatttggggataaaattgttggtgcctttaagatgtcttgggacggcgcttttgttatcttgaatggtcttaaagggctaatcctacagccaagtctcaataaattaggtggtcctgttgcgatttatcaactgagtaatacagctgctagagaaggttttgcaagagtccttgaattaatggctatgctttctattaatctgggtatttttaatttgttgcctattcctgctcttgatggtggtaaaattttaatcaattttatagaagttattcgaaaaaaaccgctcaaacaagagacagaaacctatattaccctcgctggtgttcttattatggttgcgcttatgattgcagtaacttggaatgatatcatgcgagcatttttctaaattaatgatacggagtataatttttaatgaaacaaagtaatatgataatccccaccttgcgcgaaatgccaagtgatgcacaagtcatcagtcatgcccttatggtgcgtgctggttatgtccgccaagtatcggcagggatttactcttatttacctttagctcatcgcgttattgaaaaaattaaaaaaatcatgcgtgaagaatttgataaaattggtgctgttgaaatgctggcacctgcccttttaacagctgacttatggcgtgaatccggccgatatggaacttatggggaagatctttataagttaaaaaatcgcgatcaatcagattttattttagggccgactcatgaagaaacttttacaaatctcatccgtgatgcagtgaaatcttacaagcagcttcccttgaatctttatcaaattcaagcaaaatatcgtgacgaaaaacgccctcgcaatggcttgcttcgtactcgtgaatttattatgaaagatggctatagttttcatgctgattatgacagtttagatgctacttatgaagattatcgtaaggcttatgaagccatttttactagagttggtttagattttaaagcgattattggtgatggcggtgctatgggtggtaaagatagtcaggaatttatggcagtaacgccagatcgtacagatttggagcattggctggttcttgataaagctattggctctattgaagagattccagctgatgttttgaaagagattaaacaagaactctcctcttggttaatatcaggcgaggatactattgcttattcaagtgagtctgattatgcggctaatctggaaatggcgacgagcgaatataagcctaacaataaggttgtttctcatgaagatatacagcgtattgaaacaccaaattgtaaaacgattgatgaagttgctgcctttttagaaatagatccaacacaaaccataaaaaccttgttatttattgcagatgatgaaccagttgttgctttacttgtaggaaatgatcaggttaatgaagttaaactaaaaaactatctgggtgctgacttcttggaaccagctaatgaagaagaagcaagagaaatttttagtgcttcctttggttctctaggtccagttaatctaccagaaaatgtcaaaattgtggcagatcgtaaggtgaaaaatattgggaatgccgttgttggtgctaatgaagatggttatcatttgacaggtgtcaatccggaacgtgactttgaagctgcttatgttgatattcgtgaagtctgtgaaggagaggcatctccagatggtaggggtgttcttaaatttgcgcgtggtattgaaattggtcacatttttaaattgggaacacgttattcagaaagtatgggagctaacattcttgatgaaaatggacgttcaatccctattattatgggaagttatggcatcggtgttagtagaattctatcagcagtcattgaacaaaatgcacgtatctttgttaataagacacctaaaggagcttaccgattttcttggggagttaattttcctaaaacgttggcgccatttgatgtccatctcattacggttaatgtaaaggatgaagtctcccaacaattgacagcaaaagtagaagaaagtttggtagatgctcactattctgttttaacagataatcggaatgagcgtattggttcgaaattttctgatagtgaccttattgggctgccgattcgtgtaacagttggtaaaaaagcttcagatggtattgtagaagttaaaataaaatcgactggagatacaattgaagtcaatgcagagaacctattagaaactttatctattttgatagactagaatttttttgaaggctgagctacttgtgcccagccttttgatatttaagatattataaaatcaggttcagaaagagaatgagcgattcagcagttgatttttaataatcaatagtgtatttgtcaaaactttttgaaattcttttgaaaaagtcttgacaaaattataaatactttgatatactatgaaagttgctgtttaaagtagcactaagccctttgaaaactgaacaagaagacgaaccaaccaaagtgcagggtgacataaagaaatgtgacctgtcaaagaacgaaaaaaaactgtcagagtgcagaaatgagtgaagactcaagcttttaatgagagtttgatcctggctcaggacgaacgctggcggcgtgcctaatacatgcaagtgggacgcaagggaacacactgtgcttgcacaccgtgttttcttgagtcgcgaacgggtgagtaacgcgtaggtaacctgcctattagcgggggataactattggaaacgatagctaataccgcataatattaattattgcatgataattgattgaaagatgcaagcgcatcactagtagatggacctgcgttgtattagctagttggtaaggtaagagcttaccaaggcgacgatacatagccgacctgagagggtgatcggccacactgggactgagacacggcccagactcctacgggaggcagcagtagggaatcttcggcaatggacgaaagtctgaccgagcaacgccgcgtgagtgaagaaggttttcggatcgtaaagctctgttgtaagtcaagaacgtgtgtgagagtggaaagttcacacagtgacggtagcttaccagaaagggacggctaactacgtgccagcagccgcggtaatacgtaggtcccgagcgttgtccggatttattgggcgtaaagggagcgcaggcggtcaggaaagtctggagtaaaaggctatggctcaaccatagtgtgctctggaaactgtctgacttgagtgcagaaggggagagtggaattccatgtgtagcggtgaaatgcgtagatatatggaggaacaccagtggcgaaagcggctctctggtctgtcactgacgctgaggctcgaaagcgtgggtagcgaacaggattagataccctggtagtccacgccgtaaacgatgagtgctaggtgttaggccctttccggggcttagtgccggagctaacgcaataagcactccgcctggggagtacgaccgcaaggttgaaactcaaaggaattgacgggggcccgcacaagcggtggagcatgtggtttaattcgaagcaacgcgaagaaccttaccaggtcttgacatcccgatgctattcttagagataggaagttacttcggtacatcggagacaggtggtgcatggttgtcgtcagctcgtgtcgtgagatgttgggttaagtcccgcaacgagcgcaacccttattgttagttgccatcattaagttgggcactctagcgagactgccggtaataaaccggaggaaggtggggatgacgtcaaatcatcatgccccttatgacctgggctacacacgtgctacaatggtcggtacaacgagttgcgagccggtgacggcaagctaatctctgaaagccgatctcagttcggattggaggctgcaactcgcctccatgaagtcggaatcgctagtaatcgcggatcagcacgccgcggtgaatacgttcccgggccttgtacacaccgcccgtcacaccacgagagtttgtaacacccgaagtcggtgaggtaaccttttaggggccagccgcctaaggtgggatggatgattggggtgaagtcgtaacaaggtagccgtatcggaaggtgcggctggatcacctcctttctaaggaaaaacgcaaagcacattaggggaacttcttgtttagttttgagagggtaagtggggccttagctcagctgggagagcgcctgctttgcacgcaggaggtcagcggttcgatcccgctaggctccattaaaacaggatactaacagacggttcgcttgcgaatacttctgtagaagattatctaattttctacagaagtcagtctggagttcaacttcatatcttgtttaagacaaggaagtctataaaatccacttaggatatgttaagtatcctagagatggttcattgacaattgaatagctagtaaaagccctatagcgcagctatagggaaacaaaaaagaaaccgagacgctgaaaagccagagaaacgagaaataaggttaagttaataagggcgcacggtggatgcctaggcactaggagccgatgaaggacgtgacgaacgacgacatgctttggggagctgtaagtaagccttgatccagagatatccgaatgggggaacccaacaggtaatgcctgttatccataactgttaaggttatgagaaggaagacgcagtgaactgaaacatctcagtagctgcaggaagagaaagcaagagcgattgcctcagtagcggcgagcgaagaggcaggagggcaaaccagagtgtttacactctggggttgtaggactgcgataaagcagccaagggaatagaagaagactctgggaagagtcgccagagagagtaagagcctcgtatttgaaattcacttgatgccaagcaggatcctgagtacggcgggacacgaggaatcccgtcggaatctgggaggcccatctcccaaccctaaatactccctagtgaccgatagtgaaccagtaccgtgagggaaaggtgaaaagcaccccggaaggggagtgaaagagaacctgaaaccgtgtgcttacaagaagttcgagcccgttaatgggtgagagcgtgccttttgtagaatgaaccggcgagttacgtttacgtgcgaggttaagttgaagagacggagccgtagggaaaccgagtctgaaaagggcggttaagtacgtagatgtagacccgaaaccaagtgacctacccatgagcaggttgaaggtgcggtaaaacgcactggaggaccgaaccaggacacgttgaaaagtgtttggatgacttgtgggtagcggagaaattccaaacgaacttggagatagctggttctctccgaaatagctttagggctagcgtcggtcgcgagactcttggaggtagagcactgtttgattgaggggtccatcccggattaccaatctcagataaactccgaatgccaacgagttaagaccggcagtcagactgcgagtgctaagatccgtagtcgaaagggaaacagcccagaccaccagctaaggtccccaaataattgttaagtggaaaaggatgtggggttgcacagacaactaggatgttagcttagaagcagctattcattcaaagagtgcgtaatagctcactagtcgagtgaccctgcgccgaaaatgtaccggggctgaaacaatttaccgaagctgtggatcccttaggggatggtaggagagcgttctatgtgcgcagaaggtgtaccgcaaggagcgctggagtgcatagaagtgagaatgccggtatgagtagcgtaagacaggtgagaatcctgtccaccgtaagactaaggattccaggggaaggctcgtccgccctgggttagtcgggacctaaggagagaccgataggtgtatccgatgggcaacaggttgatattcctgtactagagtattgagtgaaggagggacgcagcaggctaactagagcgtgcgattggaagagcacgtccaagcagtgaggtgaggactgagtcaaatgcttagttctgcgccaccaagctgtgacggggagcgaagtttagtagcgaagctagtgatgtcactctgccaagaaaagcttctagcgttaatgaatactctacccgtaccgcaaaccgacacaggtagtcgaggcgagtagcctcaggtgagcgagcgaactctcgttaaggaactcggcaaaatggccccgtaacttcgggagaaggggcgctggcgataagtcagccgcagtgaaaaggcccaagcaactgtttatcaaaaacacagctctctgcgaaatcgcaagatgaagtatagggggtgacgcctgcccggtgctggaaggttaagaggagcgcttagacgtttgtcgaaggtgtgaattgaagccccagtaaacggcggccgtaactataacggtcctaaggtagcgaaattccttgtcgggtaagttccgacccgcacgaaaggcgtaatgatttgggcactgtctcaacgagagactcggtgaaattttagtacctgtgaagatgcaggttacccgcgacaggacggaaagaccccatggagctttactgcagtttgatattgcgtatctgttacacatgtacaggataggtaggagccaaggaagagtgaacgctagtttacttggaggcgatgttgggatactacccttgtgtgatggctactctaacccggtaggttgatcatctacggagacagtgtctgacgggcagtttgactggggcggtcgcctcctaaagcgtaacggaggcgcccaaaggttccctcagactggttggaaatcagtcgcagagtgtaaaggtataagggagcttgactgcgagacagacaagtcgagcagggacgaaagtcgggcttagtgatccggtggtaccgtatggaagggccatcgctcaacggataaaagctaccctggggataacaggcttatctcccccaagagttcacatcgacggggaggtttggcacctcgatgtcggctcgtcgcatcctggggctgtagtcggtcccaagggttgggctgttcgcccattaaagcggcacgcgagctgggttcagaacgtcgtgagacagttcggtccctatccgtcgcgggcgaaggaaatttgagaggatctgctcctagtacgagaggaccagagtggacttaccgctggtgtaccagttgttctgccaagagcatcgctgggtagctaagtagggaggggataaacgctgaaagcatctaagtgtgaagcccccctcaagatgagatttcccataacgttcagttagtaagagccctgagagaagaacaggtagataggttgggagtggaagcgttgtgagacgtgaagcggaccaatactaatcgctcgaggacttatccaaaaataagtgactaagggcgtaaaatccgcctgaaaaataggaaatgggtgcagtgtttgatgaacaccagaccatttctcttttttccaaggatttagcccgagtaccattttttaaagaaagcaggcgcagcgtcggtttcagtggctagctattcaatcgtgagtgagcgatcacgcttgttaagtgatgatagcctaggggagacacctgtacccatgccgaacacagcagttaagccctagcacgcctgaagtagttgggggttgccccctgtgagatagggtcgtcgcttagcaagagggagtttagctcagttgggagagcatctgccttacaagcagagggtcagcggttcgagcccgttaactcccataactaagtaactaaagtgattagttagaggtcccgtggtgtagcggttatcacgtcgccctgtcacggcgaagatcgcgggttcgattcccgtcgggaccgtctttttctgaaaagagagggatcatcgactcgttagctcagttggtagagcatttgacttttaatcaaagggtcactggttcgagcccagtacgggtcatcaagagatgcgggtgtggcggaattggcagacgcaccagatttaggatctggcgcttaagggcgtgggggttcaagtcccttcacccgcatatagaggagataggccggcttagctcagttggtagagcatctgatttgtaatcagagggtcgcgtgttcaagtcatgtagccggcattgcgaacgtagttcagtggtagaacatcaccttgccaaggtgggggtcgcgggttcgaatcctatacgtaggttgacttataacatatccagagagaaggctacccttgaccttctcttttatggctccttgtcaactgtaataagtgattgataaagcgtgcgagagaatcagattggttctctcttttgtgatgttcaaatttttagtagctaatataactaaaaacactcctaagttggacttttgtatccaattttagaagtgcttacaagtgaattgcttttaaattaccattatttgaaaagttacaaatctatgtccaattcataagggagaataatagtttctctgccattattatcaataatttgtacgatttctggatagaaagggtcaaatttggttgcatagtcagatacaataacggttttactgtatttatcgtagtacttaaaactcagttgcccttgattattcactaattgaaaggttaaaagagtgtcaagtgtgaaaacgtcttttaagttattatcaagaatttcccaaaaaacatcaatcaattcgggaggtaaacttgttaccacaccaaaacttgcataccgtccctttgtatttgtaaaggccatgatataagactcctttctataaaaaagaaagcaccactgaagtgctttttgacaactttaacgattcttaagttcaagataacgtttgtaccaaatattgatataggattgtgaaaagggtcctttaccattattaatccagtctactaaaattttgacattttctttcaaaatgtagtcgatatcagaagaatatcccattttttgtttatgtaactcatattcatcaacatctagaagttttttttcaccatctgcaaaaaccttaacatctaaatcataatcgatatactttaatgcttcttgatccattatataaggactagctaagttgcaatagtaagaaacgccattatctcgaatcattgcgatgatattaaaccagaattttttatgaaagtaaacaatagctggttcgcgggttacccatcgtctcccatcactttcagtgactagcgtatgatcattaacaccaataacggcattttctgttgtttttagtaccatagtgtcgcgccaagttcggtgcaaactaccatcatgcttataactttgaattgtaataaagtcgccttccttaggtaatttcattgccttaccaactttctacaattaagcttgtcctttacagtttaacataatttcaagaaaaaagcatttttttctgtcagaaaggttacaaatactcccgtaaggcatttttaatagcatcaaaggcaaagccttttctggctaagctttgtgtcaggcgttgtctgagttcataattttcatattttttactatatttccgatattgtttatctagttctttataaataagttcttcttcattttcagaattgttttcaatatctaaatcttcaagagctatttgggcttcttgataggaaaatcctttggtcgttaaggcttgcttgagtttatccttgagagctctttttgggagtttactttgatattttttaaggagtttttgagccgttttaatgcaaatactgctgaaatcaaaatcttttaacatgtcttcaattaattgagattcgattcctttttgaagtaatttctgtttaaggataaaggcgcctttatcaccagaatgaagattttgctgcaatatattgtcgatatatttactgtcatcaagccacttttcctcttttaattgggtgagaatctgaggaataacagtagtgttaatatcatgtcttatcagataatctttgacttctttttccgtgcgctgtttaaaagaaagataatacagagcaaggtttttaccataagaaaattgggcaaaggtcttgatttcttctagttgctcaggaagaatttccttattcttgctgagcataaaatggacaatggtatcttcagtgatatagaaatgttcagcttcatcaatttcaatcagataaagtctttttttcttttcaattttagtaattttcatgcctttattatagcagaaaatgatagaatagtagtatgaatttacgagtaaaacaaaagattcccttgaaaatcaagagaatgggaattaacggtgaaggaattggcttttataagagaaccttagtttttgttcccggtgctctgaaaggtgaagagattttttgtcaaataaccagtgttaaacacaatttcgtgcaagccagactattgaccatcaataaaaaatctaaatttcgggtgcggcctgcttgtcctatttatgaggaatgtggcggctgtcaaatcatgcatttacgttatgataaacaattggatttcaaaaaagatttgctaaagcaagctttgaaaaaatttaagcctcaaggttatgagacctatgacgttcgagcgacaattggaatggaacaccctcagcattatcgcgccaagttacaatttcagacgagaaaatttggcggttctgttagagcgggacttttcaaagagcagagtcatcatttggtagatattaaagattgtctggtacaggatgagctaacccaaaaaatcgtcaatcgagtctgtcagcttttggacgactacaatatctctgtttatgacgaacggcgtcattttgctggtgtcagaactatcatggtcagaaagtcacaagccaccaatcaagttcagttgatttttgtaaccagtaaggaagttaatctcgtcggaattattcgtgatttgacaggatattttccagaaattaagacggttgccgttaattttaattccagcaaatccagtgctatttatggtcagaaaacagaaattctctggggtattgatagcatatcagaggaagttttagattattccttttctttatctcccagagccttttatcaacttaatcccaaacagacgcaagttctttatcatcaagcacttcaagctcttgatgtgactgcagaagatcatttaattgatgcttactgtggtgtcggtagtattggtcttgcttttgctaataaagtaaaatcagttagagggatggatattattcctgaagctattacagatgctaaaagaaatgctgagcgtatgggatacacaaacacctattatgaaatggggaaagccgaaaatgttattccaaaatggtacaaagaaggttatcaagcatcgacgcttattgttgatccacctagaacaggacttgatgagaaacttttaaaaactctgctaacctatcagccagaaaaaatggtttatatctcttgtaatgtttcaactcttgccagagatttggttcaattggttaaagtctatgaagtcaattatatccaatcggtcgatatgttccctcatacagcaagaactgaggctgttgttaaattagtaaaacgaaaacaaaatagttgttctaaaaagtaaggaagtaaaatgacaaaaacaatcactttaatatatattagtttaagcggcaataccaaaagttttgtaactcgcttgacaaactatctacagtcaaaaacggacttaacaattcattctgtcaatgtcaaagatttagttaaagatcaggcggattattttgccctatctgattattttgttgctttcttaccaacctatcttgaaggtggaaatggtcttgacagtggggatattgaaattttgacaacccctttacgagagttcatagcttttgcagataattatcgttattgctatggcattgttggttcaggcaataaaaattttaacaatcaatattgtctgacggctaagcagtatgctgaacaattcggttttcctgttcttgataattttgaattgcgcggtctggccgatgatgttgaacgtgttggtgataagattttagccttatacgcagttaactaatatttttatttaagaacaagtagatcaacaagcaacaatagaaaaaaggaactgagataaattttcagatcctttttcaattatcgttattgttaccgcccaccggacattgtgaaattttgattagaattattttcttgattttaaaacatttaagttatgttggttattaaaaataaacctataagttgtttgatattgtatagttattgttatacaatagaactataaagaaaaaggtgaggtattaatatgtcaactatagctattcgtgttgatgacgaattaaaggaaaaagcaacagagctttataaggaattgggtcttgatatgtcaacagctgttaagctttttttgacacaaagtgtaaaaacaagaagtattccttttgagattaaagattcttctgcagatgatttgcttaataagcgtttaactgatttgattatggaaaatgctgaaacagtgaaaacaattgatttagataattcagattagatttgatagtgagatagtgctagctttaagtataacgagtcaatattctttaaaatcagtaaatattaggcagaaatattttagaattatggattgttctgaggcaggattaaaaaaaccgtcttgggttgatactatcaatattttacgatttagtccgtctacttttagtcattttcgagttattggaaaacttactcaaagggataagataagatttgtgaaattttatgtggatcgtaggaaaggataggaagaatgaaaaaggttttgactttgttaacggtttttggatggcaatgatattggtggcttgtttgtctggcagcaatactgaacataaaacttctgtttctaatatggatggaacatattatgagttttataagcttaagaaagtaattggataatttctaagcgaggggttatagaaatattaaatgatacattaatgtggacgatagagcataaaaatcagtattctcttaataagaaaaagaaaacgactagtgtgaatgaactgcacctcataagttagacaaaaatctaatgattggggtgtttttattatgaaactaagttatgaagataagatttaaattggggttaaaattggggtgccattgttaaaaaggctctaaaaaagccgacctaataggaattaggtcggtcaagtttcatgccaccaccgagaatcgaactcggaacggagcattaccattgctctattataccatttaactatagcggcgactcatctatcatactataaaataatgaagaatgcaaggagggaaacttaatatcatttgttcattaatttaaattagaaaacgaaatggctatctctttttctcttaaaatggtataataacagttacagaattttttacaaggaagatatgatgtcatacgaacaggaatttttacgagaatttgaagcttgggtcaattcacaagtgaccattaacgaaatggccatgaatgctagtcgtaaaatcattgaagaagataaagatgagcgtgcagcagatgcctatattcgttatgaaagcaaactggatgcctataaatttatccaaggaaaatttgaaaattataaggctggcaaaggatttcacgatataccagacggtctttttggtgagagaaattattgatttctaaaggttaatctgataaaataaggtcattcagaggtgttttgaattccatttgttataggaagcggcgttactgggaaatccgcacaaatgtcgaaactggttgctgatgtgattttttgaaataaaatgagttgcgggtctagcccgaaactgggtggtaccgcggagatcatagaatgacattcgtccctgtcaattggcagggacggtttttggtaggaaagagcacataccagtttactgggaaaaaggttgcaaggcaatcactgtacggacttggtttatggactgttggagaaggaatgggaggaaagtattgtttgaaacaagtgataatattaatcaatttattcgtacattaagagacttaaacgaaattattgaaaaaagagcaaagcttaatttactggataatgcggtgttagcagaatctttttataaagaaattttaaatgctttattttcttggaagttagaaaatttaaatattgaacagtccaattttgaagcaattgatttaattgatgataaaaataaaattgttgttcaaatttcatgtacttgtgagaatcaaaaagtgcatggtactatttctaaagatgaattaactaaagaagattataaggaatacgtactttactttgtttttattggaaaacagaatagcaagattaaaaatggtaaatataataatacttcacaattgaattttaatcccaagaagaatatttttttaacagaagatttaataaaaaagtttcaggatttaaccccaaattctcagcgtaaagttcttgatattattcaaaattatctaagtaatgagaaaagtggcgagaatatcttatcaaaaagagaaatttcagaaagcattcttgaaattttggatgagaatagtgaaatcttttttaagtatggtccacattctaaagtagcttcaactagtccaatgagtaagtcttcctataaaatttggaataagcaaaaacaaaaaattattgagaataacaaagatatattaaatttgtatagtaaacatcaatcattttttagtagaaaagaaaaattgctatttaacaaatttaaatcaaatgttgaatcatttgaatgtaatgacaaacaaagactagattcaaatgtatatgaatcatttccagaagactttccaaaaatgttagaatcaattattaaaaatcaaggagttaatttaaatggttaattttagcgatgaaccgagaccagagtcagtagtttattttgaacagatattagagagacatggtaagattgttagatatgaaagaccagaagattttatttataagttatttcttagtggtggtaagacatatttagtatggttaactaataagtacactgtatctattaatgatgttgttgaaaagataaatgaaggttttgatgctttaatcaccattagtatgtggaatagctatacgtatgaagctaaagaatatgcactacaaaaacattttggtttattcaaaattcaagaattcatgggtgcattaaattactcagatccatctcaatattatatgggaattgatgaagaagatggtaaaagattgtatggggaacgcgattataaatttgattagtaacatagaatttaaaaaattactagatgaaacgattcgatttgaactttatcaatttggttcttcgttagaaaaagaagagtttaacgatattgatttattgttaatatataaaaatagtgaaaaaaataaacagaatgaaatactaactctaaagaaaataattaaaagttatttatttaaacagtatcagattgatattgacatcacagttttatcagaaaatgaagagaaagaaaagaaatttctagagcaagtcaattatataaaagtatattaaggagaacatatatgtcaacacaactttcatcaaaatacaatccagcagaagtagaagctgggcgctatcagaaatggcttgatgaggatgttttcaaaccgtcaggcgataaaaaagcacatccttattctatcgtgattccaccaccaaatgtgacggggaaattgcaccttggtcacgcttgggacacgactttgccggatattattatccgtcagaagcgcatgcagggctttgacacgctctggctaccaggaatggatcatgctgggattgccacacaggcgaaagtagaagcccgtttggctgaggatggcatttcccgttatgaccttggtcgggagaaattcttggataaggtctgggaatggaaggatgagtatgcggcaaccatcaaggagcaatggggcaagatgggaatttctgttgattattcgcgggaacgtttcacccttgatgaaggattgtctaaagcggtccgcaaggttttcgtagaactctataaaaaaggctggatttatcgcggcgaatttatcatcaactgggaccctaaggcacgcacagctttgtccgacatcgaagtcattcataaggatgtggaaggtgccttctaccatatgaattatatgttggaagatggctcgcgcgctttggaagttgcgaccacgcgtccagagaccatgtttggggatacggctgtcgctgtcaatccaaatgatgatcgttacaaagatctgattggacaaaatgttatcttgccaattgttaacaagctgattccaatcgtagcagatgaacatgctgaccctgagtttggaacaggtgtggttaaaatcacacctgcccatgatcctaacgacttcctcgttggtcagcgtcacaatctgccacaagtcaatgtcatgaacgatgacggaaccatgaacgaactggctggcgaatttgctggcatggatcgctttgaagcccgcaaggcaactgttaagaaactggaagaaatcggcgctcttgtggaaatcgaaaagatgacccactcggttggtcactcagaacggacaggtgtaccaattgagccacgtctgtctacccagtggttcgttaagatggaccaactggctaagaatgccattgccaatcaagacactgatgacaaagtggacttttacccaccgcgtttcaatgataccttcctgcaatggatggaaaatgtgcatgactgggtgatttcccgtcagctctggtggggtcaccaaatccctgcttggtacaatgcggatggtgacatgtatgtcggtgaagaggctccagagggtgatggctggaagcaagatgaagatgtgcttgacacttggttcagctctgctctttggccattctcaactatgggctggcctgacacggactcagaagatttcaaacgttatttcccaacctcaacgctggtaacgggttatgacatcatcttcttctgggtttcccgtatgattttccaatctttggaattcactggccgccgtcctttccagaatgttctcatccacggacttatccgtgacgaacaagggcgcaagatgtctaaatctctcggtaacggcattgaccctatggatattgttgacaaatatggtgctgatgctttgcgttggttcctgtcaaatggatctgcaccgggtcaagatgtgcgtttctcttacgaaaagatggacgctgtttggaacttcattaacaagatttggaacatttcccgctatatcctcatgaataaagaaggccttagccttgatcaagctagcaaaaatgttgttttagtaaccaatggcaaagctggtaatgtgacggaccgctggattcttcataacctcaatgaaaccattgccaaagttactgaaaacttcgacaagttcgaattcggtgtggctggtcacatcctttataatttcatctgggatgaatttgccgactggtatgtggagttgaccaaagaagtcctttacagcgaagatgaggctgaaaaagttattacgcgttcggtcctcctttacaccttggacaaaatcttgcgtcttctccatcctatcatgccatttgtaacagaagaaatcttcggtcaatacgcagatggttctatcgtgacagcagcttatccaactgttaatcctgcttttgaaaatcaaacggcgcattctggcgtggaaagtctcaaagacctgattcgagctgtacgtaatgcgcgtgcagaagtcaacgtagctccaagcaaacctatcaccattcttgtcaaaacaagcgatagcaacttggaagactttttcaaggccaatgtcaactacatcaaacgcttcacaaacccagaaacacttgaaatcagctctgccattgccgccccagaactagccatgtcagcagttatcacaggtgcagaaatcttcctgccgctggctgatctgctcaatgtcgaagaagaattgactcgcctaaataaagaacttagcaaatggcagaaagagctggacatggtagccaagaaactcagcaacgaaaaatttatcgccaacgccaaaccagaaatcgtccaaaaagaacgcgacaaacaagccgactaccaagccaagtacgatgcgacagtggcaaggattgaagagatgaagaggttggataatgaaaagttttaattttaataggtgataaaatgagtaattttaatgaatttttgaaggaacagtgggataaagttgaacaattagaatttagggaagttgaacaattagaattcagggaaaaagaaagtagaaagcgtaataactttaaaagagactatgcaagagttatatactcaacttcgtttagacgccaacaaggtaagatgcaactgtttgagataaatagtcaaacatttcatagaaatcgtttaacacatagctttgaagttgctcagattgctaatggaattgtcgatgaactcagacatagagttgaaaacactgataacagaattgatgaagaattatttaaaaagttttcaaatatggcaacagtggttgaaacagcttccttaattcatgatattggaaatcctccatttggtcatcatggtgaaagagttttaaatgaacttgctcccaagattggatttgagggaaatgcacaaggaataaggattttaagaaaaattgagaaaaaatctcctaaagaaagggggttaaatctaacttatcgaacattagctgcaattataaaatattatgtaccttatacaaaaggaacaaaaaaatttttgtataaagatgactatgaagaattagaggaaattttagaagataaaaaaatacttttaccatttagaactatagatgttcaagtagtagatcttgcagatgaaattgcgtactgtgcctacgatttagaagatgcattatcaaataattatttcacaatagatgaatttatttttagattagaacaaaataaggaatttaatgatgagtgcaaaaaggatttcaaagagtgggttgaaaaagcaaagaagtttgcgaaggtcagtaatacaactgatgattatgatttttacttccgcagagagctgatttcaataattgttaataaacttattaaagatattactgtagtagatcttgataaaaagttcaaggaaaaaaccggaacatgtaatgagcaagaattaggttttaaaaattatagggatttggcaactgcattaaaaaagactgtttttaactgtgtaacaaattcggacaatattatgttgtatgagagggtgggaacaaaagttctaacaaaactctttaacttgtttgtgaatgaaagttataataaaaatggtttacttatgccgatagagtatagatgggatgataaaactgaacaaagtgaaaaaataagaaaagttttggactatatatctggaatgatggatacttatgctgtggaagtatatattaaacattttggaaaagatccttttattgtgaagtatgatcaagatatttttaaagttgataataaaaggtagccaagtgataaataacctttcattttcaagatagtaaaggaatcattgtagtatgcaaccaacatataatattgacaatcccaatttgccttatcaaaccaaacatgccctttggcaaacggcatttggtcttcagcaggtagatggtttaaagccgtcggtctatatggaagaattggctgagaagcaagcgcgtggcagctattcttatgagcaggtttatgaggaaattacagcttatcatcaatcaacggatgatagcacggctgaagcggatttggtctctttgcgcattgtggaacttctttcccgaagtggctttagttttagtccggctacacttttgagcattcataaagagctctttcaggatatttttaatgattctataccagtcggtcaatgtcgtcagacaaatatttctaaaaaagaagcggtactgaatggtgaaagtgtggtttatgctgattatcctatgattcaagccactttggactatgattttcagcaggagaaaattttccaatactctggtctttcaaaggaaattatggttcagcacatccaatccttcatttcaggcatttggcaaattcatccttttcgtgagggaaatacgcgaataataacagtttttctgatcaagtatctgcgagaatttggctttacagttgacaatacaccctttcaaaaacatgctaaatttttccgagatgccttagttttggataatgccaaaattttgcaaaaacgtctcgagtttttgactgtattttttgaaaatctcctgcttagtggagagaatgttctgtctagcgaggaaatagaccgaaacttaggcttggataaaaatagtaaagtcaattaacatctgaggacaggaaggtttctgacgtaccctaaatttgaggtaactgagatgacgtagttactgaccgtcaagatgttattacgagaaaccatcacctttgtggcgattttttaggaaatcttgtcaactgtagtaggttgacctatcttaatatatgttcactttcgtatgggcttctatcgcattattaccaaggccgatgatgaggaatttgtctgatttcataattgtattaatctcagtccgtccctgggttttatgtaaggatagctcagcaatctttgtctggcattaatattaggatttattttctccaccccaaaataaaaaattaaaacagaaaaaaagcgagaaaagctattgacaaaggggggaagagctggtagaataaagaagttgtctcagaaagaggcagagccctttgaaaactgaacaagaagacgaaccaaccaaagtgcagggtgacataaagaaatgtgacctgtcaaagaacgaaaaaaaactgtcagagtgcagaaatgagtgaagactcaagcttttaatgagagtttgatcctggctcaggacgaacgctggcggcgtgcctaatacatgcaagtgggacgcaagggaacacactgtgcttgcacaccgtgttttcttgagtcgcgaacgggtgagtaacgcgtaggtaacctgcctattagcgggggataactattggaaacgatagctaataccgcataatattaattattgcatgataattgattgaaagatgcaagcgcatcactagtagatggacctgcgttgtattagctagttggtaaggtaagagcttaccaaggcgacgatacatagccgacctgagagggtgatcggccacactgggactgagacacggcccagactcctacgggaggcagcagtagggaatcttcggcaatggacgaaagtctgaccgagcaacgccgcgtgagtgaagaaggttttcggatcgtaaagctctgttgtaagtcaagaacgtgtgtgagagtggaaagttcacacagtgacggtagcttaccagaaagggacggctaactacgtgccagcagccgcggtaatacgtaggtcccgagcgttgtccggatttattgggcgtaaagggagcgcaggcggtcaggaaagtctggagtaaaaggctatggctcaaccatagtgtgctctggaaactgtctgacttgagtgcagaaggggagagtggaattccatgtgtagcggtgaaatgcgtagatatatggaggaacaccagtggcgaaagcggctctctggtctgtcactgacgctgaggctcgaaagcgtgggtagcgaacaggattagataccctggtagtccacgccgtaaacgatgagtgctaggtgttaggccctttccggggcttagtgccggagctaacgcaataagcactccgcctggggagtacgaccgcaaggttgaaactcaaaggaattgacgggggcccgcacaagcggtggagcatgtggtttaattcgaagcaacgcgaagaaccttaccaggtcttgacatcccgatgctattcttagagataggaagttacttcggtacatcggagacaggtggtgcatggttgtcgtcagctcgtgtcgtgagatgttgggttaagtcccgcaacgagcgcaacccttattgttagttgccatcattaagttgggcactctagcgagactgccggtaataaaccggaggaaggtggggatgacgtcaaatcatcatgccccttatgacctgggctacacacgtgctacaatggtcggtacaacgagttgcgagccggtgacggcaagctaatctctgaaagccgatctcagttcggattggaggctgcaactcgcctccatgaagtcggaatcgctagtaatcgcggatcagcacgccgcggtgaatacgttcccgggccttgtacacaccgcccgtcacaccacgagagtttgtaacacccgaagtcggtgaggtaaccttttaggggccagccgcctaaggtgggatggatgattggggtgaagtcgtaacaaggtagccgtatcggaaggtgcggctggatcacctcctttctaaggaaaaacgcaaagcacattaggggaacttcttgtttagttttgagagggtaagtggggccttagctcagctgggagagcgcctgctttgcacgcaggaggtcagcggttcgatcccgctaggctccattaaaacaggatactaacagacggttcgcttgcgaatacttctgtagaagattatctaattttctacagaagtcagtctggagttcaacttcatatcttgtttaagacaaggaagtctataaaatccacttaggatatgttaagtatcctagagatggttcattgacaattgaatagctagtaaaagccctatagcgcagctatagggaaacaaaaaagaaaccgagacgctgaaaagccagagaaacgagaaataaggttaagttaataagggcgcacggtggatgcctaggcactaggagccgatgaaggacgtgacgaacgacgacatgctttggggagctgtaagtaagccttgatccagagatatccgaatgggggaacccaacaggtaatgcctgttatccataactgttaaggttatgagaaggaagacgcagtgaactgaaacatctcagtagctgcaggaagagaaagcaagagcgattgcctcagtagcggcgagcgaagaggcaggagggcaaaccagagtgtttacactctggggttgtaggactgcgataaagcagccaagggaatagaagaagactctgggaagagtcgccagagagagtaagagcctcgtatttgaaattcacttgatgccaagcaggatcctgagtacggcgggacacgaggaatcccgtcggaatctgggaggcccatctcccaaccctaaatactccctagtgaccgatagtgaaccagtaccgtgagggaaaggtgaaaagcaccccggaaggggagtgaaagagaacctgaaaccgtgtgcttacaagaagttcgagcccgttaatgggtgagagcgtgccttttgtagaatgaaccggcgagttacgtttacgtgcgaggttaagttgaagagacggagccgtagggaaaccgagtctgaaaagggcggttaagtacgtagatgtagacccgaaaccaagtgacctacccatgagcaggttgaaggtgcggtaaaacgcactggaggaccgaaccaggacacgttgaaaagtgtttggatgacttgtgggtagcggagaaattccaaacgaacttggagatagctggttctctccgaaatagctttagggctagcgtcggtcgcgagactcttggaggtagagcactgtttgattgaggggtccatcccggattaccaatctcagataaactccgaatgccaacgagttaagaccggcagtcagactgcgagtgctaagatccgtagtcgaaagggaaacagcccagaccaccagctaaggtccccaaataattgttaagtggaaaaggatgtggggttgcacagacaactaggatgttagcttagaagcagctattcattcaaagagtgcgtaatagctcactagtcgagtgaccctgcgccgaaaatgtaccggggctgaaacaatttaccgaagctgtggatcccttaggggatggtaggagagcgttctatgtgcgcagaaggtgtaccgcaaggagcgctggagtgcatagaagtgagaatgccggtatgagtagcgtaagacaggtgagaatcctgtccaccgtaagactaaggattccaggggaaggctcgtccgccctgggttagtcgggacctaaggagagaccgataggtgtatccgatgggcaacaggttgatattcctgtactagagtattgagtgaaggagggacgcagcaggctaactagagcgtgcgattggaagagcacgtccaagcagtgaggtgaggactgagtcaaatgcttagttctgcgccaccaagctgtgacggggagcgaagtttagtagcgaagctagtgatgtcactctgccaagaaaagcttctagcgttaatgaatactctacccgtaccgcaaaccgacacaggtagtcgaggcgagtagcctcaggtgagcgagcgaactctcgttaaggaactcggcaaaatggccccgtaacttcgggagaaggggcgctggcgataagtcagccgcagtgaaaaggcccaagcaactgtttatcaaaaacacagctctctgcgaaatcgcaagatgaagtatagggggtgacgcctgcccggtgctggaaggttaagaggagcgcttagacgtttgtcgaaggtgtgaattgaagccccagtaaacggcggccgtaactataacggtcctaaggtagcgaaattccttgtcgggtaagttccgacccgcacgaaaggcgtaatgatttgggcactgtctcaacgagagactcggtgaaattttagtacctgtgaagatgcaggttacccgcgacaggacggaaagaccccatggagctttactgcagtttgatattgcgtatctgttacacatgtacaggataggtaggagccaaggaagagtgaacgctagtttacttggaggcgatgttgggatactacccttgtgtgatggctactctaacccggtaggttgatcatctacggagacagtgtctgacgggcagtttgactggggcggtcgcctcctaaagcgtaacggaggcgcccaaaggttccctcagactggttggaaatcagtcgcagagtgtaaaggtataagggagcttgactgcgagacagacaagtcgagcagggacgaaagtcgggcttagtgatccggtggtaccgtatggaagggccatcgctcaacggataaaagctaccctggggataacaggcttatctcccccaagagttcacatcgacggggaggtttggcacctcgatgtcggctcgtcgcatcctggggctgtagtcggtcccaagggttgggctgttcgcccattaaagcggcacgcgagctgggttcagaacgtcgtgagacagttcggtccctatccgtcgcgggcgaaggaaatttgagaggatctgctcctagtacgagaggaccagagtggacttaccgctggtgtaccagttgttctgccaagagcatcgctgggtagctaagtagggaggggataaacgctgaaagcatctaagtgtgaagcccccctcaagatgagatttcccataacgttcagttagtaagagccctgagagaagaacaggtagataggttgggagtggaagcgttgtgagacgtgaagcggaccaatactaatcgctcgaggacttatccaaaaataagtgactaagggcgtaaaatccgcctgaaaaataggaaatgggtgcagtgtttgatgaacaccagaccatttctcttttttccaaggatttagcccgagtaccattttttaaagaaagcaggcgcagcgtcggtttcagtggctagctattcaatcgtgagtgagcgatcacgcttgttaagtgatgatagcctaggggagacacctgtacccatgccgaacacagcagttaagccctagcacgcctgaagtagttgggggttgccccctgtgagatagggtcgtcgcttagcaagagggagtttagctcagttgggagagcatctgccttacaagcagagggtcagcggttcgagcccgttaactcccataactaagtaactaaagtgattagttagaggtcccgtggtgtagcggttatcacgtcgccctgtcacggcgaagatcgcgggttcgattcccgtcgggaccgtctttttctgaaaagagagggatcatcgactcgttagctcagttggtagagcatttgacttttaatcaaagggtcactggttcgagcccagtacgggtcatcaagagatgcgggtgtggcggaattggcagacgcaccagatttaggatctggcgcttaagggcgtgggggttcaagtcccttcacccgcatatagaggagataggccggcttagctcagttggtagagcatctgatttgtaatcagagggtcgcgtgttcaagtcatgtagccggcattgcgaacgtagttcagtggtagaacatcaccttgccaaggtgggggtcgcgggttcgaatcccgtcgttcgctttaggaggccggggtggcggaactggcagacgcacaggacttaaaatcctgcgaaggggaaccttcgtaccggttcgattccggtcctcggcataaataaagaaggagcacccttggctcaactggatagagtacctgactacgaatcaggcggttgcaggttcgaatcctgcagggtgcatgagtggggttagtaaaggactagcacactttaatgatgaggagaggttttacgggaagtagctcagcttggtagagtacttggtttgggaccaaggggtcgcaggttcgaatcctgtcttcccgattatagtcctttattaattgtagtgaagagatatagacttattgtcaacatagtgggttgacttatactgacgtttagagaggattgcttaatcttctttttttggtattcaaaatgataaggcctaattaattattcaaatatgatgttaatattaggaagaatcgttgactaaaaatatttaacattatatgaattgtataaaaattgaagtttcgtataaaatgctctgtaactttagaagttagtttatttaggttagattatgaatgagcatgggaaagtgcaatttattacggcataaaaaactccgtaattctatagcaatttacttactaaaagaattatagagttaaaaatattggcctattaaaataactatttactcatctttcataaaaaatgtttggtataaggctctaactgcttgtttttcttgttcagttttgataacaaacatgacggatacttcactggaaccttgggaaatcatttccaagttaatatgttttttggaaaatgcttcagcagctttggcagtcaccccaatgtgatttttcatattttctccgacaatcatgataatagaaagattgcgttcaatttcaacttcgtcaacttctaatttacgagttaattgtgagatgatttcttgctcttttataggggtcaattcacggcctcttaaaatgattgacatatcatcaataccggtcggaatatgttcccaacgaatgttcaattcttctaaaacttgaagaactttgcgaccaaaaccgatttctctattcatcagatatttggaaagattaatactgacaaaatcatcatctccggcaataccaacaactggtatagtggcaccagtatgcgcaagaacaatttttgtgcctggatgttcgggattatttgtatttttaataacaaggggaatttttccgcgataggcagggattaaggcttcgtcgtggagtactgaaaagcctgcgtaagccaattcacgcatttcacgataggttagttctgaaatagaatgtggcttatgcacaacccctgggtgagctgcaaagataccatctacatcagtaaagttttcataaaggtcagctttaacacccgctgcgacaattgaaccagtaatatcagaaccaccgcgcgaaaaagtacagatttgattatcaattgtaacgccgaaaaaaccagggataactaaaacttcgtcactatctcgcaattcttctaatttgtcataactggatggaataatccgagcattaccgggttcacttgtaacaatgatacctgcttttttagggtgaatataacgagcagagaggccatttttcctgaagtattcggcaattaatttggcattattgtcctcacctgcggctaggaaagtatcatataggaaatcattatcttcaataggcaaatttgcaagatcaacaatagctttagtaattttttctaagatattttgaccaaggccaagttcatcaataatagcacggtagcggttgataatccaagattggtcagcagtaacgtctttatctgaagtataagatctatagtatctaatgagagcatctgtaacttttgtatcttgagcgttacgcttacccggagcagaaacaacaacaaagcgtcgttcttcgtctgattttatgatattcagaactttttctaattgtgttgcagaggccaatgaactgccaccaaattttacgactttcatattttctccaaaattaataaagttacataaattatagcaaaattcagaaaatttgtcagtaatttttgtggtaaaataaagaaaagaaagaggtagtgatggcaactaaagcagtcatttttgatatggatggtgtcctttttgatacagaaggtttttattatcgaaggcgagaaatttttttaaatgataaaggaatttccatcaaacatataccaccagcattctttattgggggtaatatgaaacaggtttggcaaaagatattgggagacgattatgctaactgggatgttgaacagttacaaaaggattatactaactataaaagtaaacatcctctgccttaccaaaatttgatttttcccgatgttaaagtcattttagaaaaactcaagcagcatcaatttaaaatagctttagcatctagttcaactaaatcagatatcttactggcgctcaataagacagggatttatgattattttgaccttgttttatcgggagaagaatttcctgagagcaagccccatcctgcaatttataatgaagctgcctatcagttgggttttcctaaatcagaattactgattattgaagatagtgagaaagggattgctgctggagtatctgctggcatagaagtttgggctatcaaagacagaacatttggacttaatcaaagagctgctagtcgcttgttttctaatttgacagaagtggttgattttcttttaaaataaaaagcgtaaaaaaaactatttttatttttgagaactccttatttttatgataaaatgtagaagttaggaactttgattttcaaactatttttgtcaagtaagcagacaatttgattatcttaatatttaatcattttgaattagagatggagaaataagaagatggattttaaggaaattctgtacaatgtggataatggtgtggcgactttaacgctgaatcgtccggaggtttctaatggatttaatatccctatttgtgaggaaattttgaaggccattgatactgctaaaaaggatgacacagtacaaattttactgattaatgccaatgggaaagtcttttcagttggtggcgatctggttgagatgcaaagagctgttgatgcagatgatgtacaatctcttgttcgcattgcagaacttgtcaataaaatttcttttgctttaaaacgtttacctaagccggttgtcatgagtacagatggtgcagttgcaggtgctgcagctaatatagcggtagctgcagacttttgtattgccagtgacaaaacacgctttattcaagcctttgtgaatgtcggtttggcccctgatgccggaggacttttcttattaacgagagccattggtattactcgtgcaacacaacttgccatgaccggtgaagctttaaatgcagagaaagctttggaatacggtattgtttacaaagtctgtgagccagagaaactagaaaaaataacagatcgtgtcattacacgtttgaaacgtggctcagttaattcttataaagccattaaagaaatggtttggcaaagttcatttgcaggttggcaggaatatgaggatctagaattagaattgcaaaagtcattagcatttacaaatgattttaaagagggagtgcgtgcttatacagagaaacgccgtcctaaatttacaggacagtaatattcttgattgctctgttaaaagtgtaagtataggctgggacaaaaatgttccgcctttttattgtgcagtggttgattaaattttcacatcttggttttttaggatcaaacttatacctaattgaagtcgcaatgaaatgacaatttcttaatttttatacgtaatcttataaatttacactattttgtgggtgattgcatagcaatcatagaaatttgtctcactcttctgtttttataatttaattttaaataaacttgcaatttgggtcatcttttgataaactttgatagtcaaagtttatttatgtgtgggaggtgacatattggattataaacaaattaatacctatttagttgatattttcaataaaattatgattatcgaagagatgagcttgaaaacaagtcaatttaacgatgtgtctttaaaagagatgcatacggtagatattattggaaaaaatgccaatgtgacaccgagtgatattgctcatgagttattagtaactttgggaacggttacgaccagcttaaataagcttgaaaaaaagggttatattgaacggacgcgttcacaacttgataggcgcgttgtttatttaaccctgacacaaaaaggaagactgctttatcgtttacataataggtttcataaaaatgtggttaatcgaatcacagaagcaatggatacgacggagcttggtgctttggagaaggggctgagaaaccttcatcaatttcttgaggggttagtttaatgacttttgcaaagattagtcaagcagcatattatgtaccatcacaggttgtaaccaatgatgatttatctaaaataatggataccagtgatgaatggattacaagtcgtacgggaataagagagcgccgtattagtcaatccgaagataccagtgacttagccagtcaggtggccaaagaacttttaaaaaaagcctcattaaaggcgaaagagattgattttattattgttgctacaattactccggatgcaatgatgccatcaacagctgcttgtgtccaagcgaaaattggtgcagtgaatgcttttgctttcgatttaactgccgcctgcagtggatttatttttgcactttcagctgcggaaaaaatgattaaatccggtcagtaccagaaaggtttagttatcggtgcagaagttttatctaaaatcatcgattggtcggatcgaacaacagctgttctttttggagatggagctggcggtgttcttttagaagcagattcttctgaacattttttatttgaatctattcattcagatggcagtcgtggtgaaagtttgacatcaggtgaacacgctgtttcgtcacccttttcacaggttgataaaaaagataactgttttctaaaaatggatggtcgagctatatttgactttgctattcgtgatgtgtcaaaaagtatttcgacgctcattaggaagtcagatatgcctgtagaagcgattgattatttcctattacatcaggctaatattcgtattttggataaaatggctaaaaaaattggcgctgatagagaaaaatttcctgctaatatgatgaagtatggtaataccagtgcagcaagtattcctattttattagccgaatgtgtcgaaaatggaactatagagctaaatggttcacacactgttctcctgagcgggttcggtgggggtttgacatggggcagtttaattgttaaaatttagttatacaattgtgcttagcacagtatataaaaaattatttcttataaaggagaaagaaaatggcagtatttgaaaaagtacaagaaattattgttgaggaactcggcaaagatacagatgaagttaaattagaaacaacttttgatgaacttgatgcagattcccttgatgtctttcaagttatttccgaaattgaagatgagtttgacattcaaatcgaatctgaagatggacttaacacagttggtgatttagttgcttttgttgaagaaaaaacaaaataagtagtattttgagagtattcttgtaagaatattctttcttctttattataatagtttgactgtcaaattattgattgaaaaacttagaaagtttaatttaaaatgaaaacgcgtattacagaattattagatattgaatatcctatttttcaaggaggaatggcttgggtagctgatggtgatttagcgggagctgtatcaaaagctggcggtttaggaattatcggtggtggaaatgcgcccaaagaagttgttaaggcgaatattgacaagatcaaagctgtgacaaataaaccatttggagtcaatattatgcttttatctccttttgctgatgatattgttgacttggttattgaagaaggtgtcaaagttgtcacaactggtgcaggtaacccaggtaaatatatagaacgtttccatgaagcaggtattactgtcattcctgttgttcctagtgttgctcttgctagacgtatggaaaaattaggtgctgatgccgttattgctgaaggaatggaagcaggtggacatattggtaaattaacaacaatgactttagtgcgtcaagttgtagatgccgtcaacattcctgttatcggagctggtggtgtagccgatggtcgtggtgcagcggcagtatttatgcttggtgctgaagccattcaggtaggaacacgttttgcagttgccaaagaatcgaatgcccatgcgaattttaaaaagaaaattttaaaagccaaagatattgatactgttatttccgcgtctattgttggtcatcctgtacgtgcaatcaaaaataaattatcttctgcctatgcaactgcagaaaaagaattcttgcgtggtgaaaagagtcaagaagatattgaagttcttggtgctggagctctccgcaatgctgttgttgacggtgatgttgataatggttctgttatggcaggtcaaattgcaggatttgttactaaagaagaaacttgtgaagaaattttgaaagatttatattatggtgcagcaaaagtcattaaggctgaagcagcacgctgggcagacgtggagaaataataatgacaaaaacagcatttttatttgctggccaaggagctcaaaaacttggtatggcaagtgatttgtatgaaatttacccagttgtcaaagagacttttaaaaccgctcattcaattttgggatatgatgttcgtgctttgattgataatgatgaagaaaagctaaatcaaacacgttatgcacagccagcgattttaacaacttcagtagctatttatcgtcttttgaaagaaaaaggttatcaaccagacattgttgctggactgtcactaggagaatactctgctcttgttgcagccggtgccatttcatttgaagatgccttagccttggttgccaaacgtggtgaatttatggaaacagcagcacccgctggagtggggaaaatggttgctgttatgaatactgaccctaggctcattgaagagatttgccagaaagccagctctaaaggcattgttagtccagctaattataatacccctacacaaattgttattggtggtgaagtggcagctgttgattatgctgtggaacttttaaagggagctggtagtaaacgtttgatttctcttaaagtttctggtccctttcatacggctcttttgaaatctgctagtcaaaaattggctcaagctttggaaaatattaagttttcagatttcacgcttccactagtgggaaacactgaggctgaaattatggaggaacatgagattaaatctttgcttgctcgtcaagttaaggaacctgttcgtttctatgaatctattgctgtaatgcaaaaatttggtgtgaataactatgttgaaattggacctggtaaggtcttgagtggttttgtgaaaaagattgataaatctgcaaagatctcagctgttgaagacttagctagtttgcaggctttcttagataactagaagaggtgttttagatggaaatcaaaaataaaaatgtttttatcacaggttcaactcgtggtatcggtctagctattgctcataaatttgctcaggcgggagctaatattgtattaaatggtcgctcagaaatttctcaggacctagtagctgaatttaaagattatggtgtcaaagtagcgacaatttcaggtgatgtctctcattttgaagatgctaaacgtatggttgatgaagctactgaagcattgggaagcgttgatatcttggttaataatgctggaattaccaatgataagctgatgttgaagatgacagaagaggactttgaaagggttcttaagatcaatttgacaggtagctttaacatgactaaagctgttttgaaaccaatgaccaaagctcgccaaggtgctatcattaatatgtctagtgttgttggacttgctggaaacgttggtcaggctaattacgcagcttctaaagctggtttgattggctttaccaaggcagttgctcgtgaagtcgcggctagaaatgtacgtgttaacgctattgcaccaggttttattgaatctgagatgactgaacgtattccagataagatgaaagacgctatgttaaatcaaattccaatgaaaacatttggaaagactgaaaatgttgctgaagttgctatatttttagctcaacaagattatctgacaggtcaagttattgctattgatggcggcatgaccatgcaatgatgcatttttaaatttagaatatattcccccaataaaaggagaaaaggtatgacattaaaaagagttgtagtgacaggttacggcgtaacatcgccaatcggacatacaccagaagatttttggaatagtcttcatgatggtaaaatcggtattaaaccaattactaagtttgatgcttcagaaattcctgttttcaatgcaggcgaaattcaagattttccatttgataaatactttgttaaaaaagataaaaatcgtatggatacttactctctttatgccatttatgcagccatggaagctattgaaaatgctgcacttgacatggcacaagaaattcgtgatcgtgttggtgttattgtatcctcaggtattggtggtttacaagaattagaagatcaaatcattcgtatgcatgagcgtggcatgaaacgcattaaaccaatgtttatccctaaagctctgtctaacatgggagctggaaatattgccctcaagattggcgcacaaggagtctgcaaatccattactacagcttgtgcttcagctaatgatgctattggtgaagctttccgtgaaattaaatacggttttcatgatgtgattcttgcaggtggttcagaagcatccattactaagattggtattggtggtttcaacgctttgactgctctttctacaacagaagatccagcgcgttcagctattccatttgataaagatcgcaatggttttgtcatgggtgaaggtgctgccgttcttattctggaaagtcttgaacatgctcaaaaacgtggggctaggattttggcagaggttgttggttatggaagtaactgtgatgcctaccatatgacaacaccgactcctgatggttcgggtgctgctaaggctattaaattagcaattaatgaagcaggtatctcaccagaggaagtcaattatgttaatgctcatggtacatcaacacaggccaatgaaaaaggagaaagcaaggcaatcgttgctgttttaggtaaagatgtacctgtctcttctacaaaatcattcacaggccatcttcttggtgctgctggcggtgttgaggctattgccactattgaagcaattcgcaatcattttgtacctatgacagctggcactaaggaactttcagaagatattgaagcgaatgttgtttatggtcaaggtcaagaagcagatatcaaatatgctatctcaaatacctttggatttggcggacacaatgccgttcttgcctttaagcgttgggaggattaattttgaatatttcagaaattaaagatttgatggcacaatttgatacgtcaagtctgagagaattttcttataagaatgggacagatgaattgtctttttcaaaaaataggcagggctctatcagttcagtccaaacagtccccgttcctgctgctaattcagtttcgactgttgcatcggtagacgctgaagcggtaccagctatctctaaaaatgaagaaagcacagcggcagctccagtagctgaaacagctgaaggggaaattgttgaaagtccgcttgttggtgtagcttatttagcctcagctcctgataagccagcttttatttcagttggcgacagtgttaaaaaaggacagactttacttatcattgaagctatgaaggttatgaatgaagttccagcaccaaaagatggcgttgtcactgagatcttagtggctaatgaggaagtcgttgaatttggaaagggattggtacgtatcaaatgattgacattagcaaaattcgtgaagctcttcctcatcgttatccaatgttattggttgatcgtgttcttgaagttagtgatgatgaaattgttgccattaagaatgtaaccattaatgaaccctttttcaatggtcattttccccaatatcctgttatgccgggtgttctgattatggaagcattggcacaaacagcaggtgttctggaattatcaaaaaaagagaatacagggaaacttgtcttttatgcaggtatggataaggtgaaatttaaaaaacaagttgttcctggagatcaacttattatgacggctaagtttgttaagcgtcgtggaacaattgcagtagttgaagctaaggcagaagtagatgggaaattggctgcaagtggtaccttaacttttgccattggaaattgaaattctataactgctagtttttaagagtttgttcccacaaatacacggaaaggaattgaatccgggctaaagacattgtgaaaagaataatttgcttgtatcattagagagatttctgcagattttctatttccgttttgtttttttagcctttggtatcttattttatgtttaagaaaattttgattgccaatcgtggtgaaatcgctgtgcgtatcattcgagcagccagagaattaggaattgtgactgttgcagtttattcagaagcagataaagaatcgcttcacaccctcttagcagatgaggctgtatgtgttggaccggctaaatcaacggattcttaccttaatatgaatgctattttatcagcagctattgtaactggggctgaagctattcatccaggttttggttttttaagtgaaaattctaaatttgcaactatgtgtgaagagatgcgtattaagtttattggtccatctgcatctgttatggacaaaatgggtgataaaattaatgcacgttctgaaatgcttaaagccaaggttcctgttattccagggtcagatggggaagtttttactgcccaagaagcattagaaattgcccaagatattggctatcctgttatgctgaaagcttctgctggtggtggtggtaagggcatccgtaaggttgataaaaaggaagatctaacagcagcttttgagtcagcctctcaagaggctctatcagcttttggcaatggcgctatgtatctggaaaaagtcatttatcccgctcgccatatagaagttcaaatactgggggattcttttggcaatattattcatcttggtgaacgtgattgttcattgcaacgtaataatcaaaaggtcttagaagaaagcccttctatagctattgggaaaacacttcgtggtaaaatgggtgatgcagcagttcgtgccgctaaagcggttgcttatgaaaatgccggaacaattgaatttctcttggatgaggcttcagggcaattctattttatggaaatgaacacacgtgttcaggtcgaacatcctgtaacagaatttgtgactggtattgatatcgttaaagaacagattaaaattgctgctggtcaagaattgacttatcaacaaaaagatattgttatttcagggcatgctattgaatgtcggattaatgcagaaaatcctaaatttaatttcgcacctagcccaggtaaagttgaagatctctttttaccaagtggtggcgttggtttacgtgttgatagtgctatgtacaataactatactattccgccttattatgacagtatgattgccaaaatcatcgttcatggagaaaaccgctttgatgctttaatgaaaatgcagcgtgctctgtatgaatttgaagtaactggtgtggttacgaatgcagagtttcaactggacttaatttctaatccaaatgttattgctggtgattatgatacttcttttttgatggaaacttttttacccgcttatgctaatgataaagaataggtgttgatatggctttatttgaaagaaaaaacaagtatattcgcataaatcctcaacgctcgatgaaaaagacaaaggagcgggagactcctgaagttccggatgaattatttgctaaatgtcctgcttgtaaacacatgatctatcaaaaagatttgggtctagaaaaaatttgccctaaatgtttttataattttcgtatttcagctaaagaacgattagctattacagttgatggagactcttttcaagaaatgtttacaggcattaaaagcaaggatccgcttaattttcctgcttatcaggaaaagttagcagcaacccaagctaagacagggcttgatgaggctgttgtaacaggaactgctgagtttacaggacaaaaagcagcgctggctattatggattccaattttatcatggcttcaatggggactgttgttggtgaaaaaattacgcgcctttttgagtatgccagagaagaacgattacctgttgtcattttcacggcatcaggaggagctcgtatgcaagaaggtatcatgagcttgatgcagatggctaaaatttctgctgctgtaaagcgacattctaatgctggacttttttatctcaccgtattgaccgaccctacaacgggtggtgtcacagcgagttttgctatggagggcgatattattttagcagaacctcagaccttaattggcttcgctggacgccgtgtcattgagacaactgttcgtgaaaccttgcccgaaggatttcaaaaggcagaatttcttttggaacatggttttgttgatgccattgttaaaagaacagaattaaagaaaacaattgctaagctgctcgcatttcatggaggtagcaaatgagtgatgtatcaagaatactcaaggaagctcgcagtcaatcgcgtttgacaactttggattatgcagagcaaatttttgatgattttatggaactacatggagatcgtcattttgcagatgatagcgctattgttggaggtattggccttttggatggtcaagcagtaaccgtcattggcgttcaaaaaggaaagaatttacaggataatcttaatcgtaatttcggccaacccaatccagagggttatcggaaagctttgcgactgatgaaacaagcggaaaaatttaaaagaccgattgtcacttttatcaatacagcaggagcttatccgggtattggagctgaagagcgcggtcaaggagaagcgattgccagaaatttgctagaaatgagtgatcttaaagttccgattattgctattatcattggtgaaggaggctcaggtggagcactagctttagcggttgctgataaggtttggatgcttgagcatacgatgtatgcagtacttagtccagaaggttttgcttctattctctggaaggacggcagccgctcaattgaagccgctgaactaatgaaaattacagctggtgaattgctcaaaatggaggttgttgacaaggtaattcctgaacatggctatttttcaagtgaaattattcaaatgctcaagaccaatttaattgaagaattaaagaatttggatcaatatcctttgaacgatttacttgaaaaacgttaccaacgttttagaaagtattaaaaattaatctcatctttaggtgggatttttctatttttttaaaaggttttttcacccaagaaaagtctttttagatatgttataattaagagataaaaataaaggtggaaaaaagatgagtaaattgattcctgggcgtgtccgcaatgagggcatccacttttatgaaaaagatttggtctctattctagaagaaaaagataactcactattagtgcaggttgctgattataagatccaattttctcttgaagatgatttagtttcttgtccttgtagcatgtttcaaaaaagaggttattgttctcatttagctgcagttgaacattatttgaaaaatcatcccaaaggtaaaaatttggctgataatttgctagctgatgaacaaaaacttgaagaaagaaaagagaaaacttcctttggcagcctcttccttgatggtttaaacatgaatgaagatgatgatgttaaatatcgtttatctgctcaaggcagtcaaagtcctttttcttctgatttttggtggactttgaaaatcaatcgtttacccgatgaacgttcttatgttattcgtgatataaaagcttttttattattggtgaagaaggaatcttattatcagataggaaaaaattactatgaaccgctttccctgctgcaatttgatactgccagtcaggagttaattgagtttttatggcgcattctgccagattcaaatcaagtagacacagattttattatgcctaatcattcccgtaatctaacttttacaagcggtttttttgaagaaggagtgacacttttaaaccaactctatgatttctcttttgaaggagagcatcaggattatcatactattaattttgcagagttggatagttccaatcaattttatcattttaagatagttgttcatcgtcaatcaattgagttgattatcaaagaaaaaacagcaacttttttctttgataatcactatttactctatcataataccttttatcatctgaacaataagcaaagaaaattggtaactgcaattagaagtctgcctttagaaaaagacttggcaaaacatatttattttgattttgaagatcaggctaaattagcagcaagccttttagactttaagactcttggtgaagttgaagcaccagcaagttttgatattcgtgattttgatgtagtatttacgtttagtctattagctaatcgcgaaattctgttggaattgacttttgattatggacagataaaagtgtccaatgtcaagggaaaagaggctcttccttttgctagcaattttaaaaaagaaaagaagattgctaatcttttgaaacagtatggcttttcacaaggttttaggtcttatcatccccctttattagatgaagagctttataacttttttacagagaccttaagtcattttgaacggtttggtaaggtattgctttcaccttctattgaagcgttacgttatcttgaaaaacctcaaattgatattaagaccgaacagggattgttggatatttcttttgatttttcaacaatttttgaaaatgatattgataatgccttaacagcactttttgaaaatcattcctattttgttagtcaatcagggaaattaattatctttgatgaagaaacccaaaaggttagtcaagcgctgcaaaatctgcgtgcacaaaaacctcataatggacatttgcagattaataaattcgcagcttatcaagtctctgaaacccttcagaatatggataacgttcacttttcagaggacttcagtcaattagtcaaagatttacggcatccagaagatttttctttaccagaatttgaagttaatgccagtttacgtgattatcaggtcagaggtattaaatggatgtctatgcttgataagtacggttttggtggtattttggctgatgatatgggtttggggaaaactttgcagaccctttcttttttaacaagctgcttagataaagattctaaagtcttgattttatcaccttcgagtttgatttataattggcaagatgaatgtcaaaagttcacccctcagttagatgttgccgtctcatacggtttaaaggcggtaagagatgagattattgcagaaaatcatcaaattacaattactagttatgcatcattcaggcaagattttaatctctataatcaactgaactttgactatttaatcttagatgaagctcaagttatgaaaaatactcagactaaaatagcgcaaagtttgcgtgcttttgatgtcaaaaattgttttgccttatcaggtacacctattgaaaataaacttttggaaatttggtccatttttcaaattgtcttgcctggacttttacccactaaaaaagaatttcttaaaatggaaccacaaagtgtggctcgctatatcagtccttttatcatgcgccgccgcaaagaggatgtcctgcccgaattgccagatttgattgaaattaattatcataatgaattgttagatagtcaaaaggcgatttacttggcacaattgcgtcagatgcaagacggcattcgtcattcttctgattctgaaattaatcggcaaaaaattgaaattctttcaggtatcacacgtctacgtcaaatttgcgatacgccaaaactttttatgaattatgatgatgacagtgggaaattggctagtttacgtgagcttctactacagattaaagaaaatgggcatcgagcgcttatcttctctcagtttcgtgatatgcttgatctagcagaaaaagaaatagaggccttgggtttaacgagttataagatgacgggttcaactcctgctaatgagcgtcaagaaatgacgcatgcttttaataatggcagtaaggacacttttttaatttccttgaaagctggcggtgtcggtcttaacctaacaggagcagatacggtcgttttgattgatctatggtggaatccagccattgagatgcaggctattagccgcgctcatcgtattggtcaaaaagagaatgttgaggtttaccgtatgattactcgaggaacaatagaagagaaaattttagaacttcaagaaagcaagaagaatttagtaacaactgtgttagatggaaatgagagtcgtgccagtatgagtattgaagaaataaaagaaattttaggaatttcttcatgataccttttaaaaaagttatttttagtttataataggaatgtttcagaaaggatgtgagttaatgagtcgtgaaagaaagtttcctttagtcgatgataatgacgttgtggttgcagttcctaaaacaatgcgtttatatgaaaacgaagacttgattacaaatatccacgggccttatgaagataaggtttacaacgacgtaactcaagattatcagtttatacctgataatcctaatcctcagaaagtagcttcagaccgccttgtgacacaaaaggcaggaaaaacttatgccgaattagcgcgtgaagaagccagatgggatctaaaaaagaaaagacaatctttaattgcaaatgattaccctaaatcggtttctagaacaagtaccaaaaaatctgaaaaagcaattaaggctcctaagaatgagttgggacgtttttccgatcatctccatcaagatacttatatcttggctgagcttcccaaaaattattcagagccaaaaaatccttctagaaaagagaacaaaaaaaataactatgatttcttgaaaacgagtcaaatttataatcaaaaagaaaagcaagaatatcaagagcgtcatgtggcccaagaactaaatttggaacgctttgaagatgttaactagaggagaagagaaaaacatgtctaaaaccattcactttattggaatcaaaggctcaggaatgagtgccttggctctgctgcttcatcaaatggggtataaggtacaaggaagtgatgtggataagtattattttacccaacacggattggaaaaagcaggaattcccattctaccttttgcggagtccaatatcactaatgatatggaaattattgctggaaatgcttttagaaaagataataatattgaagtagcctatgctctcgaaaatggttaccattttaaacgttaccatgaatttttaggtgaatttatgaatcaatttaccagtcttggcgttgccggagcccatggtaagacctccacaactggacttttagctcatgtcttgaaaaatatcacggataccagttatcttatcggtgatggcacgggacgtggtttagctaatagtcaatattttgtttttgaatcagatgagtatgagcggcattttatgccctatcatcccgaatactctatcattactaatattgattttgatcatcctgattatttcactggtgttgatgatgtttttgctgcttttaatgattatgcgaaacaagtcaaaaaaggtctttttgtttacggtgaagatccttatttacgcaaactgacgtcttcagctccaatttattattatggtttcaaagataatgatgattttgttgcttatgatatcatgcgctcaacgaatggttctgatttcaaagtaaggcatggacaaaatgaactaggaagctttcatgtaccagcctttggtcgtcacaatgttttaaatgcgacggctgttattgctaatttgtatattgctggtgttgagatggatttggttcgtcagcatttaaaaactttttcaggtgttaagcggcgcttttctgaaaaattaattaatgatgttaccatcattgacgactttgctcatcatccaacggaaatcattgcaacacttgatgctgctcgtcagaaatatccctctaaagaaattgtcgctatttttcaaccgcatacttttactaggacaattgcccttttggatgaatttgcacaagctttaaatgaagccgatagtgtttatttagcacaaatttacggttctgcacgtgaagttgatcatggagatgtgaaagtagaagatttagcagataaaattgttaaacctgctaaagttatcactgttgacaatgtctctcctcttttagatcatcataatgctgtctatgtctttatgggggctggtgatattcaactttatgaacgttcatttgaagaattattatccaatttaactaagaatacacgataaaagatttctttactttttagtaaagactttttttctaaaggaggagaaaaagatgcttattcgacaagtgacaatggaagatttagaagatatcatccgaatcgaaaatgataatttttcagctgaagaagcagcaacatctcaagctttaaaggagcgtattgaagtcatagcagatacttttttggttgctgaacaagatggtcagatagctggctatgttgaagggcctgttatcaacagtcgttacttgactgatgatttattccataaggttaaacccaatcaagaaaagtcgggttatattgctgttacaagtctttcggttgataaagcatttcaaaaacaaggcgttggtacaactttactagctgctcttaaagatttaactgtggctcaaaaccggctgggaattcatttaacctgtcatgattatttgatttcttactatgagatgaatggctttagtaatgaaggattgtcagaatcaactcacggaggaaccgtttggtataatatgatttgggaaaatcctaagatttagttgtatgttacacggctgtaatgtaaaattgatagaattgcctttaaagcgtttttaggttataataacttttgataaacattaggaggccggctttgactgatatctttaatgatagagaaaagaaagaagctcaacagacgaaaagttttaaagaaaaaattttagcagacatgaaaaaggctaagcaatcacgtaaaaatcgtgatgttagtcaagtgaagaagggaaatgttgctaaggatcaccaaaagtattctgattcagcagtgcaaaaacaggataaagaagaaacacgaactgttatgccgattcctgaaggaaatattacagataaagatgttgataatgttctggctaatttagatgaaatttttgcgcctgggcaactgaatcattctgatcaaattaatgagaaggaaaattcccaacaaattacagggaaacaatcttcttccttaaagactggttctgctactcaagaaactgaaacttttcaatctaaggaaagtttgacacttcctaataaaaaaacatcagaaaacaaagtttctgatgttttggaagttaaagtaaaaaaaacgaacaattgggttgatgacggtgaggcagaaaattggcaattacctgatttgactgaaaaattgacaaataataatgatgaagaaacaaaagaattgcctttatccagtttggctgaaaagaccaactcagaatcggaaatgaaacatagtgtcaaagaaactgaagaactcttaaaacaagagaaaaagctatcttcaaaatatgataaaacaaaatctcagacaaaagctagttccaaggaaaaggatgtgacagctaatttgaaccaaaaaagacagcagcattataaaaaaacaaatagactcgctaaaaagatttcaactgtcttgataacttttattttaattttattgttaggaacaggactttttggttattattatgtttcgagtgctataaagccattagatgctcattcaactaagtatattcaagtagagattcctagtggttctggtaatcgaatgattggtaaaatacttgaaaaagctggtgtaatcaagaatgccactgtttttaatttttacaccaaattccgtaattacagtaatttacaaagtggctactataatttacaaaaaagcatgtctttagatgatattgctaaaactttgaaaaatggaggtacgacaacgcctcaagctccagttttaggaaaggtggtcattccagaaggctataccattaagcaaatttccaaagctatcactagcaatgctaataccaaaaaaaagacggataaaaccccttttacagctaaagaatttttaaaaacggttaaggataaagcatttattgagaaaatggtcaagaagtacccaagacttttgggaagtttacctgatgcttctaaggtgacttatcagcttgaaggttatcttttcccagccacatacagttatgggaaaaagaccagtattgaggatttaattgataatatgttagctgctatggatactaatatgcaaagttattatgatacgattgaatctcaaggaaagacagttaatgacatcttaacgcttgcttctcttgtcgaaaaagaaggtgcaacagatgatgatcgaaagaaaattgctggtattttctacaatcgtataaatcaggatatgccattgcagtctaatattgctatcctttatgctatgggaaaacttggtgagaaaaccagtttaaaagaagatgcaactattaatactaaaattgattctccttacaatgtttataccaataaaggacttatgcctggggcagtagataatcctagtttgtcagccatcaaagcagcagtagaaccagagtcaacagatgatctttattttgtagccgatgttacaacaggtgaagttcattatgctaaaacttatgaggaacactctgccaatgttgagaagtatgttaacaaaaaggtagcatcaagcagtgattcgtaagtgaatgagacaagcatataataattgtcagtgtaatcatagaattacaccttgtaaagcttacttgtaactaaagaagctgggactttgtcccagcctcttcatgtctaaataacttagaaaagagaaaaaattatgtcagaaaaaacttatccaatgactcttgcagaaaaagaacaattagaacaagaacttgaagagttaaaattagttcgtcgtccagaagtgattgaacgtattaaaatagcacgttcttatggtgatttatcagaaaatagtgaatatgaagcggcaaaagatgaacaagcttttgttgaaggacaaatttcaagtattgaaactaaaattcgttatgctgaaattgtcgacagtgatgctgttgctaaaaatgaggtcgctattggtaaaacagttattgttcgtgaagtaggaacaaacgatgaagatacttattctattgttggtgccgccggagctgatgtttttgctggaaaaatttctaatgagagtccaattgcgcaagcacttatcggtaagaaaacaggtgataaagtaatgattgaatcaccagcgggaagttatcaagtcgaaattgttaaagtgaaaaagacaaaataataagaagaacttattagaaccatagtttctaacattttgattattaaagagagataggaaagggaagagtatttctgacttcatctagtttctctctattctaaaaaacctattcctagaattaaatgactaggaataggttttttgatgcttttcaacaatcaatacgttttgttgaagaactcgtataatctttttaaccaagcgttatggaagacttagcgtagacgtagaaaatagtgttagtgggtctttttaagatgttgtgagtgccattcgagcagttgataatactgtgagaacaagctataaaagattaggtggatccgttgataacagcttccgttagtcaatgagacgattagcaaccattgactttgctatcttgctcagtctatgagtataaaattggcttattgcttatggtgacgctgtttacctgcattgcggttggacttttgctttttagaggttgtaagctttttatcattattggcttgtggagtgatatctttacgagcatttgatttgaaaggttttggagggtttttcttaaattcttcatcaatttgcttccgcaattttggtttaatgatatggtttgtgatcaattgttggatgagaccaaaaataccactgactagccagtaaagagcacctccagcaggagcacctatggaaatcataaccatcataattggcatcataaacatcatatttcttgtttgctgtctttgtgcttctggaacacttagcgttgaaacccaagactgaacaagataaagaattccaataataacagtgatgatcatatttggactgccaagtttaatacctaagaaactagcactggcgattcccttggtgtaacgggtagaaatataaagtgcagagaagaaaggcatctggatcagcagcggtagacatcctaaaccaccaaacatgctcataccgtaatgacgctgcgcctgcattaattctgtttgagcagccattttttcttcctgagttttggcattcttcatgcgttcttgaataggatcaaagactggttttagataagccattttctcagattggtaagtcatctttcgtacttgactaagacctaatggcaagatgagaagacggacaataactgtgacaatgataatagcaaagccaaatcccagaccaagattattagctaaatattggataacacttcccattggggcagcaaaaaatttgtaaacccaaccttcaccagttggttttccatttttcatctgcacgcaaccagataggaaaaaaagcatagacagagctaagcccgaaaataaaagacgcttgtaaatttttttcacgataatcttcctttgattttaataatacctatctattttactgttttttagtaaaatactcaatagttcttgagaatgattttgagataaattaattggccattctgaaatcatggtaatcagaaaaatttgctatattgacgtcaacataagtgactttagaaaaaggagatggacctttgcgaatttcttgaataaacttagctagtttttcagcattatctgactgagctagaatttctactgttccatcatcattgttccaaacacgtccataaatatcccctatttctaaagcgagattataggtagaatagcgaaaaccgacaccttgaacacgaccagagactagtaatctgacttttttcataattctttctccttttttgttataatatctttatgactattataacctcaaaagccaattccttgattaaaaaaactaaaaaattattacaaaaaaaataccgtcaatattcctatttgattgagggctggcatttatttgcagaagcacaagccaacaatgctgatattattaatatttttgtcctagagtgttatgcttctagagtatctgagtttcccaatgttgttctagtatcagagaatattttaaaagatttatctgcttcaaagactcctcaaggtattgttgctgaaatagcttttcctaagcaagtaattcctcagcagttctttggaaaatatctgcttttggaagacgttcaagatccaggaaatgtaggaacaatcattcggacagcagatgcagcagcttttgatgctgtttttgtgtcagaaaagacagcagatatttataattccaagactcttcgttcaatgcagggtagccattttcatcttcctatttatagagtcaatcttttatctttagtgaatgatttaaaaaatgcagatgttactatcattgcgaccacactatctgatcattcctgtgactataagtctttaaaaaaggttgaaaattttgcgcttattatgggaaatgaagggcaaggcattacttcagaaatggctgaacaagcagatgttttgacccatatcactatgcctggaagagcagaaagcttaaatgtagcagctgctgcagctatatttatttttagcttaatttaagttgatatgatataatgatggcgaggtgataaccatgaagaagtatgaacaagatgaagaattcatgagtcttgtaggacctttaattgaccatccgcggtttcaaaaattggaaggtattatacagcatcaccattccacgcgctcagaacattccattaatgtaagctatactagttataggattgctaaaaaatttggttgggatgctaagagtacggctcgtggcggtttgttacatgacctattttattatgattggcgagatactaagttcaataaaggtcatgcctgggttcatccaagaattgctgtaaaaaatgctcgtaaggtaaccaagcttaatcaaaaagaagaagacatcattttaaaacacatgtggggagcaaccatagctccaccgcgttacaaagagggttatatcgtaactatggttgataaatattgggctgtaaaagaggcgataacccctttaagaatgaaatggcaaaaacgccgtatctttcgtcgtaagtttttaggcagtcacaatcattagaaaaatttaggagaataaaatgaataataacacaatttacacacaaagtgatagcaggcttagcagtttttttgctaagatttatggtttagttggcatgggaattgggctatcagcagtcgtttcttatctcatgctctatgtttttcgcaataacatgatagctattatggttaatgcgccttgggtttactatgttgctatcttcgcagaactggcgcttgttttaatagcaagcaacgcagcacgtaagaatagtcctacagctttaccattgtttttggtttattcagctttaaatggctttactttgagctttattattgctctttatacccaaacaacggttttacaagcctttgtttcatcagcagctgttttctttgttatggcacttattggagtaaccattaaaaaagatttatctggaatgggtaaagctttgcttgctgctttaattggtatcattattgccagccttattaatatgtttatcggcagcggaacaatgagctatgtcattagtattatttcagtcttgattttttctggattgattgcttatgataatcaattgattaagcgtgtatatgactataatagtggaaatgtcagtgatggttgggcagtatcaatggctctcaatctttacttagactttatcaatctgtttcttagtttacttcgtatctttggaagaaatgattaaaaatataggagtataggaagaactcagagcctaatattaataatggcttgctgagtgcttcctattttttgtatcggttagttataaaagacaatgaatactatccttttaatgtagggattttctagagtgatggtttcactcttttttatggtataataaatcaataatataattttggagatcctatgaaaacaccatttgtatcaaaagaacagctagataagatcacagcacagtttccaactccttttcacctttatgatgaaaaaggcatacgagaaacagctcgtgctgtcaataaagcctttgcttggaattccggtttcaaggaattttttgcggttaaagcaacacctaatccaactattttaaagatattgcaagaagaaggctgtggggtagattgtgcgactgatgttgagttgaagatggctgataaacttggtttcgatcgctctgctattagttttacatcaaatgatactcaagcttcagagtttgtttttgcgcgcagtatcaatgcaacgattaatttggatgcctatgaacatattgctttcttagaagaagcagcaggacttcctgaaacggtttctctgcgttttaaccccggcggtgtgttttcgcttgggacagatattatggatcatcctgaagagtctaaatttggaatgactaaggaacaacttttccaaggctatcaagatttgaaagacaaaggtgttaaatcttttggcctacatgcttttttggcatctaatactgttactaatgattattatccaactttagcagctcaactatttgaattagctgttgaaataaaaaatgaattgggtatcagccttgattttatcaatttgtcaggcggtattggtattgattactcggcagctgatgaacaaaatgatattgctgttattggagagggtgttcatcaaaaatttgatgatattttagttcctaatgggctcagtcagatcaaaatttatacagaacttggacgctatatgttggcttcacatgggcatctgattactaaagtgcttcatttaaaagatacttatcgtcattatgttggtgttgatgccagtgctgttaatcttttgcgtcctgccatgtatgatgcttatcatcacattaccaatatcagcaacccacagggaactgttcaagttgttgatattgtaggcagtttgtgtgagaataatgataagtttgccaaacggcgtgaattgccagaagcgcgtgtgggtgatacacttgttattcatgatacaggtgctcatggcttttcaatgggttacaattacaatggtcgtttacgctctgcggaaattttactccgagaagacggtcaagctcaaatgattcgtcgagcagaaactccagaagattattttgcaacactttatggctttaattttgatagataaaagagagtgaaaaaggaaatggtttttcttaacagtcttcaacaattgattaggaatatgaaaagctgtcagctgttaatcaatacttattcaatcaactgattttttcattttcaaaattataaataaaaacgataatgctttggctaatttgtaaatagctataaagcttaaaagggcggaaaaagcaaagataatatttttattgctctgatttttaagaacaggtttcgatattgactgataggttttgtcaataatgagaatcttgtttaatggcttttctgcctaaggctctttttatgctattttatttgtgaaagggtttcaaatctgatataatattgatgtaaaaaatttaggagaataaaaatgaatacttttctttggattctattagttattattgccttacttgcaggacttgtgggaggcacttttattgctcgtaagcagatggaaaaatatttagaagaaaacccaccacttaacgaagatgttattcgtaatatgatgagtcagatgggtcaaaaaccaagtgaagctaaagtgcaacaagttgttcgtcagatgaataaacaacaaaaagcagctaaagcaaaggctaaaaagaagaaataatcttttagatgagactgggttttcctagtcttattttagaaagaagataagcatggataatagacctattggttttttagactccggagtgggcggtttaacggtcgtacgtgaattaatgcgtcagcttccacatgaagaggttatctatattggggattcagcgcgtgcaccttatggaccgcgtccagctaaacagataaagacatatacttgggaattggtcaactttctccttactaaaaaggtcaaaatgattgtttttgcttgtaatacagcaacggctgttgtttgggaagaagtcaaagaaaaacttgatattcctgttttaggtgttattttaccaggttctagcgctgctattaaatcaactatttctggtcaaattggcattattgggacaccgatgaccatcaaatctaatatttatgagcaaaaaatactagacctctcaccacaaatgaaagtaagaagcctagcttgccccaaatttgttcctattgttgaatcaaataaaatgaactcaagtgtagcgaaaaagattgtttatgaaagtctatctcctctggtggggaaaattgatactcttgttttaggctgtacccattatccacttttacggcccattattcaaaatgtaatgggaccagatgttgagttaattgatagtggtgcagaatgtgtacgtgatatttctgttctcctgaattactttgatcttaatcgcagcagaacttcaaaagtgctgcatcatcgtttctatacaacagctagtgtggccagttttaaagaaatagctagcgactggttacctttagctattgaagtggagcatgtaacattatgaaagaaaaaatttatgaatataaagatgatcataactggttcattagccaatggtctaaagtaggctcctcaacttactatgaggaagaggcagaagaaacttacagttctattgaacaaagtcttagaggtttacttgatgaaggcaattcgtttatactgacagttattaaaatcaactccagcatagctcttgtacgttttatcttaaaaatgcttaatgaagagcaacaagataattttaaagtcagcagtcataaaggagctattttagtgacacagggacaacagttgcttttagtttgtttgccaaaaaaaggcataactataaccgatttttttgaaaaggaaaaaaaggtttctgaattaggagatactattttaattgccacacgcaacgaaggtaaaaccaaggaattcagtcaaatgttcgctcaattaggaataaaagttgaaaatcttaatcaatatcctgatttgcccgaggtagaagaaaccggtctaacctttgaagaaaacgctcgtttgaaagcagagaccatttctcatttgacagggcagatggttttggcagatgattcagggttgaaggtagatgttttaggtggtttaccgggaatctggtcagctcgtttttcgggacctgatgcaacagatcaaagtaataatgctaaattactacatgaactcgctatggtttttgatatcaaggatcgttctgctcagtttcatacaactttggttgtagctgctccagataaggaaagccttgtggttgaagcagattggtctggatacattgattttgctcctaaagggaataatggttttggctatgatcctttgtttttagtgggagaaacagggaagaccgcagcagaactttcaaatcacgaaaaaaatattatttctcacagaggacaagctgttaagaagcttatggaggtatttccagcatggcagaacgcacattaattatcatgagtgattctcatggtgatcaacaaattgttcaggagattaaaaatcgttacttaggtaaagtagatgctatttttcataatggagattcagagttatctgttaatgatcctatttgggaagggattcatgttgtttgtgggaattgcgactttggcgattatcccgattgtttggtaacaaattttcctgaattgctagtagcacagacacatggtcacctatttaatattaattttggctttgaacgtctggatttgtgggctcaagaggaagatgctgatatctgtacttatggacatcttcatagaccagctgtttggaagaatgggaaaacagtttttatcaatccaggaagcatttcccagccgcgtggtgagattaatgaatgtctttatgctaaggtacatgtcaatgctgatactatttttgttgactatttgacgcgagaccacaagctctatccagcactttcacaggaaataaaaagatgattgcacaagaatttaaagattttctaaaaccacttttgaaagatgccctcactccggctgaggaattagctatttttattgatactcataagactgatcatgttatgctgctgttagctaataatggtttttcacgtgtccctgttctgactaaggataaaaaatatgtaggcactattagtatgtctgatattgttaaatatcaaaaagaagagggggtagataatgaaaagttagcagccctagacatttcttatatgactaacggtagttatgctactgtgagtcctaatgccgatctaacagaagtcatgcataaattagttgatgctaattttcttcctgttgttgaagcagatggtacttttttaggtattattacacgaaaaacaattttaaaagccttaaataacttgcttcatgaatttacaaatgactatacattgactaaaaaatgataacttttatttctaaatttcttgccagtaaatccttaacattgaattcgcaaaaatcttatctttatgatctgcaacaatttgccgaaattattggagaggaagtgactcccaataagcttaaattgtatgagcaatctttggctgacttaaaggtttctgctaaaaaacgtaagatttcggcagtcaatcaatttctgttttttctttatgaaaatgaagtattggatcgtttttataaaattaaaaataaagaaaaactgccgcttttgacgcctgcttatcaggaagtggatttatccgttctctaccgggaaacagaggattctaaggggcagttgattgctcttttaattgtagaattaggcttatcaccaagtgagattattcaattaaaatgggaaaatattgcattagaattccaagtcttaacagtagtcaatgaaaaagttatgagagttttagaaattccccaactgttactaccttatcttgagggagagcacaaggctgtttatttatttgataataaaggtgaagcctactcacgccaatggctttttcaaaaactgaattattatttggcttctgttgatttgtcccaaatgacagctcaaaaattacgtgaacaatatattataaaagaaaaaaataaagggactgctattttggatttaaccagaaagcttggtcttaaaagcccagtaacattggaaaaatattttaaaaactaatggatattaaattaaaagattttgagggaccgttagatttacttttgcatttggtctctaagtacgaagtagatatttatgacgttccgattgtagatattattgagcaatatctagcctatattgcaacgctgcaagccatgaagcttgaagtagctggagaatacatggttatggccagtcagttaatgctgattaaaagccgtaaattgcttcctaaagttgttgaaactgttgaagcagaagaagatccagaactgcaactcttgcatcaaattgaggaatatcgaacttacaaacttttaggagaggaactggcccttaaacataatgaaagagcacagcgtttttcaaaacccaaattagaactcatttatgacgatataacacttaaacaggataaaactgtccttgatgtctttttggctttttcaaaggtaatggctgaaaaacaggaagaaatcaaaaacagtcatacaacaattaaaagtgacgactaccggattgaagatatgatgactgtagttgaagaacaggtaattcgtcaaaaagaaaccaatttgtcttggttttttaaaagggccggttcgcttaatgagataattactatctttttagcagctctagagttaattaaagttcatcgtgtttatgttaaacaggaacacaattttgatgacatcattttaaggaaggagagtgcatgacaccgctatcaaagatagaagccttgctatttgtagctggtgaagatgggttaagtctgcgccagttggcaactttattagatatacctgtaacagcattgcttcagcaattggaaaagatggctcagaaatatgaaagggatgataattctgccttatctttattggagtcttccaaaacttataaattagtcactaaaaaagattatgcggatcttttacggcagtattctaaaacgccgattaatcagagcttatcaagagccagtttggaagttctctctatcatagcttataaacaacccattacaagaattgaagttgataatattcgtggggtgaattctagcagtgctatttcaaaactgcaagcttttgatttgattcaagaggctggaaaaaaagaggtgcttggacgtcctaatctctatgttacttcagattattttttagattatatgggaatcaatagtttagaagaattgccagatgcttccagtattgaattaaaagatgaagagtttacactttttgataataaggaaaacgaagaacaaataagtgaaaatgtaaaggaagaaaatgagaattaataaatacattgcacacgcaggagtagccagtcgtcgaaaagcagaagaactcatcaagcgggggctggtcactcttaatggtcaagtggtgattgaattggctactaccgttaaatcaggcgatcgtgtcgaagttgagggacaacctatctataatgaagaaaaagtttactatcttctcaataaaccacgcggagtgatttctagtgttagagatgataagggtcgtcaaacggttgttgatttattacctgaggttaaggagcgtatctatcctgttggtcgtttagattgggatacgtctgggcttcttattttaaccaatgatggtgattttacagataagatgcttcatccacggcatgaaattgataaggtctacgtggcgcgtgttaaaggacttgccagtaaggataatctgcgccctttgacaaaaggaatcgttattgatggcaaaaaaacacaacctgcccgctatcgtattgtcaagacggatagagaaaaaaatagatctgttgtggaactgactattcacgaaggacgcaaccatcaagttaaaaagatgtttgaagcagttggtttaatggttgataaattatcgcgtactcgttttggaacacttgatttatcgggtcttaatccgggagaggctaggcgccttaataaaaaagaaatcagccagctttacaatgctgctgttaatgaaaactaatgaaaaaagtattgattgctccgattagattttatcaaaaatttatttctcccatctttccagcttcctgtcgttatcggccaacttgttcagcctatatgatagaggcaattgaaaaacatggtttaaaaggttttttaatggggattgcccgtattttacgctgtcatccttttgttgagggaggtgaagatcctgtaccaaatcattttaccttgcgaagaaataaaaaagaaaagccgtctaaatcataaaagcctccaaaagttaatttcttaataactttggaggctttttttatgttaattgataaaaaggacttaagttttagaccaagtttttggaataaatagcaacaacatggggtaaatttctaaacgtcccgcaatcatagcaaatgatagaactaattttgaaaatgggctaaagatagcaaaggttttatcagtaccaagtataggtccaatattgttaaaagcactggcagcagcgctggttacaatcataaggttgttattatcaagtgttaaaattaaaaccagactaataaaaatcagaagatagatagctaaatatttcaacacactgtgttgtgttcttttatccagtgattgctgattgatatgcagtgatatcacacggttaggatagagactggaaagaacttgatttttagcgatttttgataaaattaatacccgcataaccttgaatccacctgctgttgatccagcagaaccaccaagaaacatcagtagaagcaagataaactgagaaaagagcggccaagttgtgagattagtaataccaaaaccagttgtagtcatggtagtggatacttgaaagaaagaaatttccaagccctcttttgctgttgcaaactgtccaccgacgtttaaccaaattaatagggttgctagcagagcaataccaatataagtacgcagttcttcatcaccaaagaaagttttaaatttacgaatcagaagaagatagtagagattaaaattaactccaaagagcaacattccgatggaaaccagatttgtaatgagcgaactgtgataatgagcaatcccatcattaaaaactgtaaatccaccagtaccagctgtacccattgctgttacgaggctatcatatagaggcataccaacaccccacagtataatagcgaaaacagcaaacataatgaggtaaataatatagaggatctgagcagtgtttttgagctttgagaccactttaccaaaaacaggaccaggtacttctgcgcgcataacttctaagtggctgtttttactgttttccataatggcaagagcaaaaacaagtactcccatcccaccgattaagtgggtaaaactccgccaaaaaagcagtgaatgtgataaaacagaaacatctggtaaaatagtggcacccgttgttgtgaagcctgaactaacttcaaaaaaagcatcaataatattaggtatttgaccagtaaagataaaaggaagagctccaaaaaaggaccaaagtacccagcaaagagctacaataagtaagccttctttggtatagatgtgataatttttaggtttaaatatgatgccaatactgccaagcaagattaaaatagccatagtggccaaaatgctaaagatgattgtaaaactttcttgataaatgaaagcaacaatcaaggggacaagaagaagtgcagcttcaattaacaataattttgataagagaaagcgtaccatacttttattcataatagcttacctctttagtaaatcataaatatgagtgatgtttgtaagaagtgtaatgacaacaatcttgtcacctacttcaagaatatcatcaccagtagggaaaattgttttaccattgcgaatgatggctgcaattaaaacattggtcttaaaatgaagttcagacaatgttttaccagccattttgttggtttggcgaatttcaaattgcaaagtttcaatacgaccatttgctacatggtgcatagcatctagattagaatcttgagcattaacacgaccgcgaataaaatgcatcatggaatcaaccgcaatgctcttaggagtgataatacttgaaaactgttcagggttaataatttctaaaatactagtacgattgactttagtaatgtttttttgcacgcctaatgtttctaaaaacatggaagcaataatattttcttcatcaacaccagttaaggtcgcaatagcatcgtagtttgcagcactctcttctaagaggatatctttagcagttccatctccttgaacgacatggatatgggggaattcttgactaaatagttcagcctttttaggattaagttcaatgactttgacttgaagatgacgattggtagtcttgagaatattaagcaaatagtaggaaattcttcctgcaccaataatcattagatgtttgataactttatttttaacaaaattatggaaatgaatcatttccatacgcttgcctgttacgaaaattttatcccctgactgaatgacagcatcaccatcaggaataatgagctcatttccacgctcaatagcgcagatgacaatattattgaatcttttacggaattgattcaaggacatttgacagaggttgttgccgtcaacaattttaaattccattaacatgacacgaccattgacaaaatgttcaactgatcgtgcattggggaaatcaaccatattggcgatataacgtgctgtcaaaagttcaggattaactactaaagaaaaaccaagaaagttcttgtctttaaagtaggtgttggaatattcaggattacgaacacggacaatggtttctttagcccccattcttttagctagaacagcagctaccatattcacttcatctttatcagtaatagcaataaaaatatcacaatgttgcacatcagcctgttctaaaattctaaagttagcaccattaccgactattcccatgatatcaagacgtttggtgacatgattgaggacggattcattttcttcaatcaaaataacatcatgttcttcttccaccagtgagcgacagagagccttaccgaccttgccgccaccaacgacaataattttcatgatttacctccgaattataataactatcatacctctttttaagggaaattgcattagtttttaatgaaaattatttattttagtagttagtgttgttttttgctgttttggtatcagttttaaaccacttcatttaccttttccataagaagaagctttaaaaagctgaaatgtgggggtaaagtatatgatttcaaagaatcataacggctactttatatttctttgggttttagaatacggttaagctcgaaaacttttttctcaaaaaataagacacatactattgcttacattatcttgacaacttttacaaaagtgatatactaagtaataagctaatcattgttttaaatcaaacctgttatgatttaagataatgaaagcaccgcacaccacgttacctgctgagctggactccgggttccgtggttctttttttgtaaagtaaaaaactagggattaaaatgaatattgaacaactcgaaagagaaaataaacagttaactttgggtagaaatcatgtggttttatttcaaccacaaattcctgcaaatacaggaaacattgctcgtacctgtgcggctactaacacctctcttcatattattcgtccaatgggatttcccattgatgataaaaagatgaagcgggcgggtcttgattattgggataaattagatgtgcatttttatgacagtcttaatgatttcatgaatatttgttcaggtaaactgcatctaattactaaatttgcagataaaacgtattctgatgaaaattatgatgacagtgagcatcattattttctgtttggacgtgaagataaaggactcccagaagaatttatgcgccagcattctgaaaaagctttacgcattcccatgaatgatcagcatgttagaagtctaaacttgtcaaatacggtttgtatgattgtttatgaagctttacgtcaacaagattttataggattagaacttagtcatacttatgctgtggataaattaaagtaatagatatgcgttaaaagtattacaaaaaagacaacatcgtttatggtattaaagatttgactatcagaaaaacgtttgagacactattcaaaaagagtgtctcaaacgttttttatataccatgtgcatttatttctaaattagagaacagtgtataactctctatatcaatttttttacttaatttggatatttcctgtgtctcctttgacagctaaacgatttttgccagaataaccttggagtagttgatgactaatatccgtatggccaacatcggtttttgcggagacaatagttgcttgtgcactttgaggcgaaagtgagacattagtgttacctgtattattagtcattctaaccagatttaaaacagtaaggttttcagcagaaatatcgcctgtatggtcaacaacatctatatttgataaggagctattttgaatagcgatgttgccaacatctgaagaaacttttcctttagcaatttggctattatagatgtttagatttcccgtgttctgctgaacagtaattttgctggcttgttgatttttgattgtaatatcaccaacattattttttatagaaacatcttttagctgaacattcttaggaatagctagagtgacattattggtatcatcttgatggaaccaattgaaaaagtcacttagtacaaaaaagtgaattctaaatttttctttttgctttaggtttagattttgatgctgtactttgtgagaaatttcttcatctaactttttgtagtaagtcagtttaaagtgttgatcctgagaagattcaattttgatatttcttacggataaatccaaatcaagcgattgaatattgtcaaattggacttctttcttgagtgcttgatcgtctttaacttgcaatttatcaattccacctgatgatagtccaatactaacaagaataagaccaaagcaacttaagattagtccgatacctatagtcattttcagtgattttctcatactctgtacccccttttatagccttgtttaacaatccattgactccatttaataaaagcaaatttaaaccattgcgctaataaaagagtaaaaacgaaaaagattaaagatagtccaagtgaaagcaggccagcacccaaaccaagactaaaggttgaaaaagaaccagaaagtttaaaaatggcttcccaaataagcacaaaggctgaagtaaaagcgctaaacccaatactaactgtaacaacaatactggataaagctaaaataataatagctaaggcaagtgccaaggcagcaatagtcaaaggcaacgctattggtgcggctagaatggctaaaattgttatccaaacaatgtgtttagatttagttgaaggtccacattcttcttcaacttttttatctaacagctgacttaaaatttcataagccgcttccttaggattacccaaatcttggataacctgagcctcattttctggaccagcttcctcaaaatattccttaaagtaatccattgcttcttcataatcagtatgtggtaatctctttaaataatgttttaactgattgaggtattcagttcttgtcatggcgaattctcccttctacaatgccatcaatggtcattttataaactgaccattccttagtcagataaacgagatgtttttctcccgaatcggttaaatgataatactttcgtcgtcgaccttgatgttcttgagtgtaagtacttaaatatcctgctttttcaagtttttttaagataggatataaggtggattctttgatactggcaattagtttaatagtttgactgatatcgtaaccgtaggagtcatgtttactgacgatagccaaaattaagtattctattagcagggctgaaacaggataatacattcagttacctcctatatataaatattttatatataaaatatatacctatatgcaaattttgtcaagtgatataaatgaaactttttaggtaagaaaacttgttattaactttattttttgatatgctataagtgtcttcagggcagggtgagattcccgaccggcggtgacaaggacgatgatttttcaacgagattagatagtaagtcgaagatgatattagactatatcaagatgagctaatgatgcgtcagagaaaagattccttttgaagtccgcgagcgcaagctgatgtggtgaaattccacaaccgacagtaaagtctggatgggagaagactgagagtttttgtattgtcatctaatcatttggtttatcttttatgatttcgttagtacttcagtgtttgctgtctacagttttctacttagtactaaaagcaaaccaaagattatatgttacactctttgggccttctttcgatttgtaaaaattggaggaatttttttatgaaaaaaacacagacaatgactatcattgcaattctatcagcgctctcttttgtgcttatgatccctaactttccaattattccaggtgtggattttttgaaacttgactttagtattcttcctattttattgggtttaatcctacttgatttaaaaagtgcctatgtcatcctttttttgagaagtctacttaaacttttgctggataatggtgggcttggtagtatggttggtttgccaatgaacatggtggcttttggaatttttattctttcttttgcgcttatttggaaagatagagatagtaaggtgaaatatgtcttggctagtattgttgggacattagcaatgacagtgaccatggtctttctcaactatgtttatgccattcccctttatgctaagtttgctaattttgatatttcaaaattcattggtgttgggaagtatttaatgagcatggtcatcccttttaacttacttgaaggggtgatctttgcggtcagttttgctgtggtttatgcagccactcaacctattttaaagaattatataagtaatgaaaattaaacaaacttatcttttaagagcttcctttgcttttttacttttaatgtttctaggatacttggtcaaattttaccctgataatttgactggtattgataccaatattcagagcgctatgcgaggggattttccttcagtagaaacttgtttttttactactattactaattttggaaatgaattatttttattcatcttttgtatttttttgtcttttctattttatatcaaaaattggaaagctgaagctggatttattttggcgaatttcgcaactgtaggtttgctgtcaacagctttaaagtacctgtatcaaagaccacgtcctaagattaagtggctgattcagacaacgggcccttcttttcctagctggcatgccgcttcaaccttactgatagcggcagccatagttgtgattattcagcaacgtatgaaaagcagcgttttaaaactgctcttacaaatacttcttattgtaatagctattttggtaggcatttctagaatttatatcggtgtccaccatccaacggatgttttaggaggctggctgttggccttaggtttaagtcaaatgatttatccttattatgatgagtggcgttttaaatggcgcttttcaggcaagcagaagtaagaaggagtcataccaattcaataatttgaatggtaaattttgctgttaatctatttggcatctaatttggaaatctatatgatttccatttttgttttaaaaaagaaaaagtattgaaaactttctgaaaagtagtaaactaaaagatgaaaaggatgtgtttttttgaaatattatgtgcagttgatgattattctcctcttttctttagtgggcgaatttgcttccaatagtttacatttacctgttccaggaagcattattggacttttttgtctctttttagctttgcagtttaattggatccgtttgcgtcatatcaatgcggttggtcaatttttactagctaatatgactattttgtttttgccagcagcagtggggattatggataagtttaatgtgattgccccttatctgctaccaatttgtctgattttattatttgctgtcattctcaatattgcagtgattactttagttgtccaatttatcaagagacattatgaaggagactttccagaatgaattttattttttcgaatcctctttttggtctttggctgtctatatttgcctatttgataggtattttgatttttaggcgttttccacatccactaacaaccccacttttactagcgacgattattgttattatttttttaaaagtaacgcatatttcttatcaagactattataagggaggagcgtatttaaatacccttattgtaccttcgacagttgctttgggaattcctttgtatcagactttccatttaatgaggcatcatgccagaagtattattttgggtagctttttagcagcagttgtcaatacgagttttactgcctttgtggcaaaagtttttggcatggatttctttttagccatttccttgtttcctaaatctgttacaaccgcaatggcagtcggaattgttgataagatgcagggaattacgaccgtaacactggttgttgttgtagcaactggtattttaactagtgttttggggccaactcttttaaaattattgaaaatcgaagatcctgtggccattggtttggctcttggtggaactggacatgctgttggtactggaacggctcttaaatacggtagaatatcgggagctatggctggtctagctattggcattacgggtttgatgtatgtctttgtatcgcccattgtggcagccattattttaaaatgacttttaatcaaccagtgtgttaaactggaatcactatacaataaaaaggttgggaacacttttgtctcatcttttttagagagatttatgttaaaataactcttatgaataaacgttataatacattaaatgactattaccgtcgtatttttggcgaaaagacttttaaggttcccattgatgctggctttgactgcccaaaccgtgatggaactgtggctcatggtggctgtactttttgtacggtttcaggttctggtgatgctattgtggcaccagaagctcctattcgggaccaattttacaaggaagttgatttcatgcatcgcaaatggccggatgtcaagaagtacctcgtttattttcaaaattttaccaatacccatgacaaggttgaggtcattcgggagcgctatgagcaggctatcaatgaacctggtgttattggtatcaatattggaacaagaccggactgtttgcctgatgtgactatcctttacctagcggagctatcccaacgtttgcatgtgaccttggagttaggcttacagacaacctatgaaaaaacgtccaagttaattaatcgtgctcattcttatcaactttatgtagaaactgttaaacgcgtaagagatttggcgccaaaagttgaaattgtttcccatctcatcaatggtttaccaggtgaaagccatgagatgatgctggaaaatgttcgccgttgtatgacagataatgacattgatggcattaaactccatcttctacatctcatgaccaatacgcgtatgcaacgtgattatcatgagggacgcttacatctgctgagtatggaagaatatgtcaacattatctgtgaccaattagaaattattcctaaaaacattgtcattcatcgtctgacaggtgatgcaccgcgtgatatgttgattggaccgatgtggagccttaacaagtgggaagttttaaatagcattgatagggaaatggaaaggcgtaatgcttatcaaggctgtaagctggaggtgaatatatgatcaaacgtcccattgaactctctcatgattttttgtcccaagttttggataaaaacagtatagccattgatgcgactatgggcaacggaaatgataccgtttttttgtcccatcttgctaagaaagtctacgcttttgatgtacaggaacaggccttaatcaagacgagagaaaaactggaacaattaaatattaaaaatgtccaactcattttagatggacatcaaactattaataaatatgtgactgaacctatccgtgcagctatttttaatttaggttatctgccttcggcagacaagtcagtcattactcagcctgctacaaccctgacagctattaaaaagattttagagagattagaaattggcggtcgtttggcaattatggtatattatggtcatgagggtggcgataaggaaaaagatgcggttctgaactttgttaaagagctagatcaacagcattttacagtcatgctttatcaacccttaaatcaaataaataccccaccctttttggtgatgatagagaaattataaaaattttcattaaaaagcgatataaaaaagcttaaaattaacgtttctgacaacttagttttaagcttttttagatatcacaatattcttattttggattagaaattgaaattttgcccagactcttttttgttcatacttgcggtttgataaagaaacgtttgtcatcaatggaaatgatattgacgggactttcataaaaattttcaaggacttgaggtgtaataatatcttttttaggaccttgagccactattttacctctacgaaggaggaggatatgactcattttatcagtgatttcttcagcatggtgggtaacataaaggatagttggagcatgtggtaactcagtaatcttttcaacttgtgttagcaatttttcacgggcaaaaagatccagtccgctggttgcttcatccaaaataatgatttcaggatcttccataaggctgcgcgcaataaggaggagttgtttttcaccttgtgagaggctgctatagatgcgaccaagcaagtgttttccgccgatgacagtaagcatttggcgtgcttcattaagttctgtttcgtcgtattccttgtagagaatgcttgatttgtatttaccagttagcacgatcttttcagccaacatatttgcagggagtcgctcagcaataaaagagcccacgacaccgattttagtccgcatattgggaatatcaccctgaccaaacctagtattgagaacttcaacctgtccttgtgttgaccaatactccgccataataagttttaaaagagtggtttttccagaaccgttaagacctagaataacccaattttctccctttttgactttccaattaagattgttgagcaagattttgccctgtttttttaaggtcacatttttcatggaaatgagtgccattttttacctctttgttgcttacttgttatttattataacataaaaatatgttaaaataagcgcaaaaggagggattatgtttaagagtagtaaattgtttttctggacagtagaaattttactggtcactttgattctctttatctggcggcaaatgggaagtatctttaatccttttttcagtgttgctaaaacgttttttcttccttttttattgggaggttttctttattatattactaatcctattgtcacttttttagaaaaccgttttaaaattaaacgtatttgggggatcactcttatttttgctgtattgctttccttgctggttttttctattaccagtctgattcccaatttgattaatcagctaacagatcttatttcagccagccaaaatatttatgtgggtttgcaggatttattcaatgaatggaaaagcaatcctgcctttaaaaatattgatatccctgttcttttaaaacagttcaatttatcttatgttgatattttgacaaatgttttggatagcgtgacagttagtgtctcaagtattgtttatatgattacaaatacggtgatgattctggttcttacacccgttattcttttttatctcctcaaggacaaagatggtttaatgcccatgttagatcgtactatattgaaaaatgataggcataatatcagtcaattactgaatcaaatgaacaaaaccatttctcgttatattagtggtgtagctattgatgctgccttcatatttgtttttgctttaattggttatcagattatgggcgtccagtatgctttcttatttgctttagttgctgggattactaatgttattccttatgttggcccttacttaggtttgacaccagttgttttagcttatgtggtcagcgatcctaagaagatgattattgctattatttatattatgaccttgcagcaaattgatgggaatattgtctacccacgtgttgtaggaagtaccatgaaaattcatcctttaacgataatggttctcttggtgttaggtggcaatattgctggtttggttggtatgttagttgctgtaccagcttatgctatcattaaagaaattgtaaaattccttgtaggtgtttatgattaccacaagaaaaataaaattgtgttataatagactaactatattaattttaggagagataactaatggaagaccccggtagccagtccttgatcttacaatttttattattactgattttaacgctttgcaatgcttttttctcagctactgaaatggctcttgtatctcttaatcgtgcacgcgttgaacaaaaggctgaagagggcgaaaaaaagtatatccgtctgctaaaagttttggaaaatcctaataattttctatcaaccattcaggttggtattactcttattacccttttatccggagcgagtttggcagattctttagggcgtgaaattgctgtttggtttggcaattcagctactgccagaacggcaggaagtcttatttctttagcttttttgacctatatttctattgttttgggtgaattgtatcctaaacgtattgctatgaatctcaaggaaaatttagctgtgctgtcagcacctgttattatttttcttggcaaagtggttagcccttttgtttggctgctttcggtctcaacaaatctattaagtcgcctcactcctatgacctttgatgatgccgatgagaaaatgacccgtgatgaaattgaatacatgttgacaaacagtgaagagactctagatgctgatgaaattgaaatgctgcaaggtgtcttttcacttgatgaattgatggcacgtgaagtgatggttcctcgtacagatgcttttatggtggatattaatgatgattctagtgatattatccaaaccattctcaatgaaagattttcgcggattcctgtttacgatgatgataaagataagattattggaatcattcatactaaaaatttattgaatgctggtttcaaggaaggttttgatcacatcaatcttcgccgtattttgcaagagccgctttttgtaccagaaactattgttgtaaatgaccttttgaccgctttaaaaaatacccaaaatcagatggctatcctacttgatgagtatggcggtgtggcaggtcttgtcaccttagaagacttattagaagaaattgttggtgaaattgatgatgagacagacaaaacagccatttctgttcgtgaaattgcagataatacctatattgttttgggaacaatgacacttaatgattttaatgagtactttgaaactgaccttgaaagtgataatgttgatacgattgctggtttttatctgactggtgtcggaacaattccaagtcaagaagaaaaagaacactttgaagtagagagtaatggcaaacaccttgaactgattaatgataaagttaaggatggtcgggttaccaaactgaagattctcgtttcagaggttgaagaaaaggaagatgaaaaagactaaacataatgttagtcttttttacttttaaagtgttataatagtaatcagaaaaacgtttacaggaaagaaaaatcatgatagaaaaagttgactacgaaaaagtaacaggacttgttaattctacagaatcttttgggtctgtagacggacctggtatacgctttgttgtttttatgcaagggtgccaaatgcgttgtcaatattgccacaatcctgatacttgggcaatgaagaatgatagagcaacagaaaggactgcaggagatgtctttaaagaagctttacgttttaaagatttttggggagatacaggaggtattactgtttctggtggtgaagcaacgctccagatggattttttaattgccctcttttctttagcaaaagaaaagggaattcatacgaccttggatacctgtgctctgacttttagaaacacaccaaaatatcttgaaaaatatgaaaagttaatggctgtcactgatttagtattgttagatattaaagagattaatcctgaccaacataaaattgtcactggtcatagcaataaaactattttagcttgtgcgcgttatttatctgatattggaaaacctgtttggattcgccatgtcttagtccctggtctgactgatcgggatgaagatttaataaagttgggtgagtatgtcaaaacactgaagaatgttcaacggtttgaaattcttccttatcatacaatgggtgaattcaaatggcgtgaattagggattccttatcctttggaaggtgttaaaccgccaacaccagatcgtgtgcgcaatgctaaaaagttaatgcatacggaaacatatgaagaatataaaaagaggattaatcattaaaagaaaagaataaaagaaagtgaaagtttattttgttatgctactttttcaagtttggtgaagttaataagtcagtcagcttatccaattaaataatagtcttgtttggaaacaaattaatctttttatggctttttttaagtaggaagagcgctaagctcatttaggtgacgttgtcatcttagacctatccgtctacaaaataaaagcgatgggaatactgaccagttgctgctgtgtcacagtatcaatacctttggtaacaatactggcaaattagagattacaagtttcgattttagcaataaaatgacggagtcggttgctcgcgtgctgatcctctaaagctgactggcaaaaaaagtcaatcaatagatgcaacaggcttctaaacaaatctaagaaaaagcttgaaagttgcttttagaaagagctgtttcaagctttttctttttaaattgtgattagaaaaaataaaagaatagacagtgtattgagagataattattagagcagagcgaactgctatttaacaattttttgtcaaaaaaacaataaatttcctatctttatagcatatttttgatataatggactttgttattgaattattttaaggtatatttaaataaaatatggcaatctaagtgaggaggctgtttgataaaattaagatgaaaaaacgaagaacaatctataaatttttattacaaactttattttattccgttatatttttaattttactctatttctttagttaccttggtcaaggtcagggagaatttatctacaacgaattttaggaagtaacaatggctaataaaaaaataaaagatatgattgcaacaattgaaaattttgctcaagaacaggcagaatttccggtttataatattttaggagaaatccatacctatggagaattaaaagctgattctgattcgcttgcagctcatcttgatcagttagatttaacagcaaaatcaccagtagttgtctttggaggacaggaatatgccatgctggctagttttgttgctctgacaaaatcagggcatgcctatattcctattgatcatcattcagccttagaacgtattgaggctattttagaggtagcagagccaagtttagttattgctgttgatgatttcccaattgacaatcttcaagtcccagtaattcagtatagtcaattagaagaaatttttaaacaaaagctatcttatcaaatcaatcatgcggttaagggggatgatacctactatatcatctttacttcagggacaactggtaaacctaaaggagtacagatttcacatgacaatctgcttagttttactaattggatgattaatgcagaagcttttgcaatacctcataggccgcaaatgctggcacaaccgccttactcttttgatttgtcagtgatgtattgggcgccaacattggctttaggtggaaccctttttgctcttcctaaagaaataactgcagatttcaaacaattatttacaactattaaccaattacccattggtgtgtggacatcaacaccttcctttgttgatatggctatgctgtcagatgactttaatgcacagcaattgcctcatttaactcatttctattttgacggagaagagttgacggttaagacggctaaaaaattgcgtcagcgttttccgcaagcaagaattgtcaacgcttatgggccaacagaagcaactgttgctttatcagctttggctgtcactgataaaatgcttgaaacatgcaaacgtctgccaattggctatacaaaaccagattcgccaacctttattattgatgagtcaggtcataaactggcaaatggtcagcaaggagagattattgtttccggtccggcagtctctaaggggtatctcaataatcctgaacgaacagcagcagctttctttgaatttgaaggtttgccagcttatcatactggtgatttgggaagtatgacagatgaaggtctcttgctctatggcggtcgtatggattttcagattaaattcaatggctatcgtattgagttggaagaagtctctcaaaatcttaacaaatcgcaatatatcgcatctgctgtagctgttccccgttataataaagaccataaggtgcaaaatcttttggcttatgttgtcttaaaagatggtgtagaagagcaatttgagagagcacttgacattaccaaggctattaaggctgatttgcaagatgttatgatggattacatgatgccttctaagtttttgtaccgtaaagatttacctttaacacctaatggtaaaattgatattaaaggtttgatgagtgaggtaaacaaaaaatgattgattttttcaagaatcttcctcacttagaagcttatggaaatcctcaatattttttctatattattttggctgtcttaccaatttttataggactcttttttaagaaacgctttcctctttatgaggcttttgttagtctgatttttattgttttaatgttgacaggtgaaaagtcgcatcaaatctttgccttgtttttctatatcatttggcaaattttctgtgtctatagttataaattttatagaaaatcacgggataataagtggattttttatcttcatgtcttcatgtctatcttacctttatctttggtaaagattactcctgcgatttggacaaatcaacaatctttatttggttttttgggtatatcctatcttacctttcgttcagtaggtatgattatggaaatgcgagacggtgttctcacgtcatttacattttgggaatttatccgttttatgctgtttatgcctactttttcaagtgggcccattgatcgtttcagaagatttaatgatgattatgagaagattcctgataaagatgaattgctagatatgttggaacaatctgttcactatatcatgcttggttttttctataagtttattttagcgcaaatattgggaacaatgattttaccggggttgaaagaaatggccctgcaaaaaggtggttggttcaattggccgactttaggagtcatgtatatttatggactagacttattttttgactttgctggttattcaatgtttgccatagctatctctaactttatgggaatcaagagtccaactaattttaaccaaccgtttaaatcacaagatttgaaggaattttggaatcgctggcatatgagtttgtctttttggtttagagactttgtttttatgcgtcttgtcaaagttttagtcaaaaataaggtcttcaaaaatcgcaatgttacatcaagtgttgcttatattgtgaatatgctgattatgggattttggcatggcgtaacttggtactatattacctatggtctatttcacggtgtcggtttagtactcaacgacgcttggcttcgtaaaaagaaaagactgaacaaagagagaaaagcaaagaatttatcacctttgccagaaaatggctggacaagagcgttaggtattgtcattacctttaatgttgtcatgttatcatttctgattttctcaggattcttaaatgacttgtggtttgcagatcaattatcaaagaaataaaaggagtatttacaatggatataaaatcagaggttttaaaaattattgatgagctttttatggaagatgtatcagatatgatggatgaagatctattcgatgcaggtgttttagatagcatgggaactgttgaattaattgttgaattggaaaatcattttgatatcactgttcctgtttctgaatttggtcgtgatgattggaatacagctaataaaattattgagggtataacggagttacgaaatgcttaaacggttatggttgattttggggccagttttctgtgccctagttttggttttttctttaattatgttctatccagctaaacatttaagtcataattataatgaagaaaaaaacgatgctgtagctttatcacctagtagttttaaaagtaccaataaaaaaatgcgtgcattgtcagacaaaaggcacctctttgtccccttttttggttctagtgagtggcaacgtattgatagtatgcatccatctgttctagcagagcgttataatcgttcttatcgtccctatttactgggacaaaaagggtcaacctctttgtcacattattttggcatgcagcaaattggtaatcagattaaaaataaaaaggctgtctatgttatttctcctcagtggttcgttccaaaggggacaagtcctatcgcttttcagcagtattttagttctgaacaattagctgattttctcttaaatcaaacaggaagtacagcggatcgttatgcagctaaacgtttattagacattaaaccgagttcgaatttgcaaggtatgataaaaaaaattgcggctggtaaaaccttaaatagctttgatagggcaagcctgcgccttattaagagtttcttgaaaaaagaagacgctttatttggaagtctgacctttagtgataattatgaacgtcgtgtattgccgcatgtcaaaaaattgcccaagcacttttcttatggaaccttaagtcaaattgctagcaaagatggtcaaaggttaacaaaaacaaatcaatttgaaattaatgatcatttttataataaacgtattaaaggacaattgaaaagactcaaaggcttccaaaagcaactgtcttatttacagtctccagaatacaatgatttacagctggcgttaactcaattagcaaagtcaaagaccaaagtcatatttgttattccgccggttaatgccaaatgggttgaatatacaggtctaagccaagatatgtatcaaaagacggttgaaaaaataaaatatcagttacagagccaaggttttgataacattgctgatttatcaaaaaatggtgatcagccttatttcatgcaggataccattcatcttggttggaatggttggctggcttttgataaagaggtcaatcccttcttatccaagaaacagctccaaccagcttataagattaataatcactttttaagtaaaaagtgggccacttatactggtaatccttttcagtttaagtgagacctttttgcctaatgaaatcaaatttggtaaaatgagaggaagaaaagaggtaattgttatgtctaaaattttagtttttggtcatcaaaatcccgattcagatgcaatcggttcatcaatggcttatgcatatttaaaacgtcaactcggcgtagatgctcaagcagtagctttaggaaatccaaatgaggagacagcttttgtacttgattattttggtattcaagcaccgcctgttgttaagtcagctcaagcagaaggtgccaaacaagtcatcttaacagaccataatgaatttcagcaatctatcgcagatatccgcgaagttgaagtcgttgaagttgtagatcatcatcgtgtcgctaattttgaaacagcaaatcctctttatatgcgtttagaaccagttggatctgcttcatcaatcgtttatcggctttacaaggaaaatggtgttgctattcctaaggaaattgcaggagtgatgctgtcaggtttgatttcagatacacttcttttgaaatcaccaacgactcatgcctctgatccagctgttgcagaagatttagccaaaattgcaggtgttgacttgcaggaatatggtttggctatgcttaaggctggtaccaatttagcaagtaaaacggctgcgcaacttgttgatattgatgctaaaacatttgaacttaatggtagtcaagtacgtgtagctcaagtcaatacggttgatatcaatgaagttttggaacgtcaaaatgaaattgaagaagccattaaagcatcacaagcagctaatggatactctgattttgtcttgatgattactgatattttaaattcaaattcggaaatcttagcattgggcaacaatactgataaagtagaagcagcctttaatttcacacttaaaaataaccatgccttcttagcaggtgctgtatcacgtaagaaacaagttgtacctcaattaacggaaagttttaatgggtaaaaaatttaaatgaaagacggtgagagctgtcttttttctttgtaaacttttttggagtacattatagatgaatcaatgcaactattgttctaatcctcatttcttataaaaaaatatgaagatactatctgttgttttcgtatcttaattggccatacttttatggaaaattagtctagaagaccgaatttttgctataatattttcatgattaaaatttataatggcgataaattaacgcgtcagccatttttcataaaacttatcaactatttgcaaatacatgatgatgtcactttgcggcagattaagaggaattttgctgatactgagcatctagaacgatctattgaggactatgtgcaggcgggttatattttacgtgaaaataaacattattacaatgcttttgagctgttagagaaccttgatggtttgacactggatagtcagatttttgtcgatgaccagtcatctatttatcaagatctgttagccttaacttttgagacctatttgtctaaccagacaaatgcagctcttatcattgaaaagacggatattagcagagatgccttaaccttatctaactacttttttaaacttaatgaaaattttcctctatcaagaaaacaaaagcccttgtatcatttattgggtgatgtcaatccgaattatgctctcaaatacatgactacctttcttttgaaattttggggtaaggatgtggtcaagcagaaacgtcctgatatttttgtccaagccttagtgctcttaggttatttggagcaagtagataaacagagttattgtttgaaaatgacttttgataaggaaaaattgattttcgcatcataaatttgcttttaatcattcttattattcttaaaagcaacagggaagtgataggggaaaatgaaattagaaagattactggctattttatccctactttcagatagaaataggataacagctaaagaactagcagaaaaatttgaggtgtccaaacggactatttatcgagatttagaaagccttaatcaagcaggaattcccattgtttcctatgctggtcgcgacggtggattttcgctgatgaaaaactatcagatagacaaacgcatcctatcaaaagcagatactaaaaatctttactctgctttaaagggcttacaaagcattaagcagcagccagaattgattgccttgatagcgaaacttctgcctgagggggagagtaatcctttagcagattatgatatcaatttttcttcttggtattcggacagtttcattcaaaagaaaattgaaattctgcaagaggccatagaaggaaaatcttgtgttttattggattatatttcaagttctggcagaaggaagcgcaaaattgagccctatcaattagtttttaaagattcagcctggtatctgcatgccttctgtcataaacgacaggcttttcgtctttttaaactgcggcgtatggcatctttaaccttattagaagaaaaattcaccggacgtccttatccagctttaacattaaaaagcacagcttattctgacttttctttggaacctgttgaaggttatgacaaggttgttttgacttatcatcctgaggatgcctttgctataaccaaagtgatggatgcttctatactagctgcttctgaaaaagaaggcatgattactttttatacgtcaaatttagctatggcttgtgatttggtttttcaattactaacaaaggtcagtgttcttgcaccaattgaattgcagcagctagttgagaaaaaattggacaaaattaaatcattctataaaaggtgacataaagctgtcatcttttttaggttatactaataggcgataaaagagaaagtaggtaggataatgaaaaatgacgttcttgtttatgtatttgatggttatgcagactgggagccatcttatgtctgctcggaattaaatagacaggatagtccctttcagattaaaactattagtttagacaagcagcctaaaaaatccatgggcggatttcgcgtgatgcctgactatgatatttccaactatcctaagaaatttaaactgctaattattcctggcggagatagttggctggcaggggaaaatactgacattctgcctgtagtagactatgctgctcgccagcaaataccgattgctgccatttgtgctgcaaccagttttttagctgaaaatgcttatttagatcatgtcaagcacactggcaatagccttgaatttatgaaaaaaggagctcctagctatcgaggagaagacttttatgtggaaagacaggcagtcagtgatggtggtattgtgacagcaaatgggacagcagccttagaatttgctagagaaattttctttttactacatgttaaaaatccccaagaaatagaggattggtaccattttaacaaagtgggcttttatcattaaacagcttttaatatcatcttattttgaaaaaatgtataataaaggggaggaggcattactatgattgatcatttcggcattaccgtacaagatttagaaaagagcaaagccttttatcaggcaaccttagcacctttaggctatgaactaagggttgacaattctttcgctgctagttttgcagaagtccgcagtgcagatcctgcaggagatttttggcttggatcaggagaaaagttcccgccaatgcattttgctttcaatgcccaaacacgagaagaagtgagagctttttatcaagctggtctaaaggcaggggctcttgataatggtgctccagacatcagagaaaattaccatcccaattattacgcagctttcttgattgacccagatggcaataacattgaagctgtttgtcataaaaaggagtagatgatggtaaagcgtcctgattttttccagattaaaacctatgaagagttttgcaagtattattggtatcagaaagaattgttgcatatttgtcagcaactggactgtgcacattggggaacaaagcaggaattaaacgataggataaaggcttattttgcaggagaaccaatgaaagcagttgaaaggaaaactaagccttttaaaccaaaagcgacacaagagcttagcttatccagttctttgctattgtgtggttttgcctttaatcaaacgtttaggacttattttgcccaacagactggcgttgaaccctttaaattcactgcggatatggcaacagcatggcggaaagtcaaggcagaaaatgatcttagctttactatccaagatcttttagatgtttatgctggaaaatctgattacgcaagatatgataatcgttcctgccaatggaatcaattttacaaggatttttgtgcagataaaaagactaaagggattaaaaataaaatgaaagtcgcttccattctttggcaagctgtcaaaaaatctgatcaggccaaggtttactcatcacaattatgggataaatattcaaatttgttagataatgaataaagaaagtagagaggaggtgtttgtcatgatagaaagattagactttgtttgcccaacaattcctgaaggcggtgaatttccacttgaacatacgggcaagggagaagacagatcacctgaattttttatcaaaaatctttctcctcatgcaagaacacttgctattactttagaagatttgacacaccctctcaaaaaggaattcacgcattggttgatttggaatcttcctgcttctagttatatcaaggctaatatttcttacggatttgaagtagcagatcctcaagaagctagacagggaatagcttatggttggcatcgttatgctggtccaaaaccaccgctgggtcaaaatcataagtatcgctttaccatttacagtctggattgttccttgaatttaaatcgctggacaagaaaaagcaaacttttaaaagcagtggaaggtcatgtcctgcaaaagggacaactaacggcttcttttggcaataaaaagatctggaatcaaaattccagaccaatgatggtatgataagattttaagacttaactttttagagtaacctcataaggatatgagactggaactgcaaaatcaatttctatcatgatttgtgtttcactctctaagtaagttaaatatcattgcttgacacttatagaattattcagttattgtttaaataatttttattaagcgaaaattgcattagctatgccaaatgcttaactgttttttgagtctttggtcactgtcctttttagcagtctcattagctgctttatttccaccaaccgacaggtatatgccgcggctgtcaacaattccgtctccggcaaaaagatgaccagcttctttgtagatagtcacttgcgtatgatttggctgatacttttcgatcagtcttgcagattcagcgcttggccacatcctatcattttctccggcaaaaatgagaatatttgcttttgtcttttcaactttaatacgtttgtcttcactgtttttatccttatctaaagcctgtttgtaggtatgataataagaaataggtgtttttatcaaaaaattatagaagagttttagagaattttctgaacggacatccaagtaaggcagtgctttaccattttgtgaccaagaagaggagtagtttctaaaatccaagccagcataaatgtggctagaaggagcatatagaacaacattatcaatagaatcatagagactggcaagcagtagggcatattctgcacctttagatgttccaattacagtaatcttatcaggttgactaaagtattgtgaaatatagctttcaatttcttgataatattctactggcacttcagcaagtgttggatgttgattgggcataccaaagaagaatagggctaaaacctgataaccttcttgagctaattgaacagcttgttcataagcaggcgtgccatcggagcccccaaaagttacaataacacctttatacttaatgttatctggaattatcctgaatccattgagataatctcctgttacgtgttcaatagtaagaccagcaatatcagttttataaagagaaagtttactaggattggcataatagtcaggagtgttagggattccttgtgagctgtacttaaaattgtgaaaagatctcatggtaaaaatgaaaagaacccctaaaatgataacaaaaagaattcctaaacagactgctatgatcatgcttgtatccttctttctaaattgttttctgcttttaatgtaaaatgttaattagtcatttgttatgagtaaagcgataaaaatcataacaagtttattttaaagtaaaaactagctaacttggtgtaaaagtaaacgaataaggattagtatgctatgcctaaccttaacgactgttggcgaacaatatagcgaaaactttaaatagtctgatccacttttttaatttttagctaaaggtattttctagccacttcaatatcaccagcatatgctgtgcgctttcccttaacaatttgaaaagcatcagctcctttaccagctataatgacagcatcgttttcagactgcgtcaatgacatagctttttgaatagcttgcttacgatcaacaataatgtttactggacgtttgatatgatgagcaatctcttgagagatgagctgtgggtcttcattgttaggatcatctgcagttaaaataacttgcaactctggatgagcattgataacataaccaaaatcagctcggcggctttctcctttatttccaggagcgccaagaataagaattaaagttcctttttgatgttcttcaacaactgacaatagtttttctaaactatctccgttgtgagcataatcaacaaagaccttagcaccattcttttgaatgagaacttccatgcgccccggcaccgttgtttgaacgatgcctttttgaatatcagtctggctagctcctagctgtaagcaggccaaggcagcagcaactgcattttcttgattgaatgagcctgtcagctgaatgtcataatggcctgctaatttgcccgtcagatcaaatgaaaaagccttgctgtttataatttgattgtcagaatatttcccatagaaatcatgtggctggtcggcaacctgttctttgacgagtgcaaaatgattcatctgactattgacgataacataacgactatgcttcagtaaaagacgcttatggtaaaaataatcttcaaaagtaggatgttcaatcggtccaatatgatcaagactaatattgagaaaaacaccaacatcaaaagtcagtccgtaaacacggccaactaggtaagcttgacttgagacttccataatgagatgagtcatgccattagcagctgcctgtgccatcattttaaaaagatctaagctctcgggggttgttagttttgatttgaagaaagtttttccatctagggttgtgttcatggtagaaatcatggccggacggtagccttgctttaagatatgataagcaaaataagcagctgttgttttgcctttagttcctgtaaaagccaaagttttcaacttatcttgagggttgtcataaaattccttagcaatcagacacatggcatttttgatattattaacaagaataagcggaatacccacttgataatctttttctgctacataaaaggttaatccgctttcgatagctttttctagaaattcttttttgaaagttgctcccttaacaaaaaagagggttgaggctttaatgtcacgactatcataagaaatgtgatgaaaagccacttctggatttgagtatttgtattgataatgcttaccatcaattatttcgcgaaaattagcattatttttaagaatcgttaatactgtttcaattgtaatcataccttttattttagacttaaagttagtgttttacaagtatcaatcaaaagtttataataaatttatcaaaatgctagaaagaatttaaatgtctgataaagaaacaaagatgacacagcaagagcaaatggttcgaggaactgcctggctgactgcgggtaatttcattagccgtctcctcggagctgtttatattattccttggtatgcatggatgggaaaatatgcagcagaagctaatgctctttttggaatgggttatgaaatctatgccctttttttactgatttcaactgtcggtattcctgttgctgttgctaaacaggtttcaaagtataacacactgggagaccctaaaaaaagtacctatcttgtgcggaagattttgcattttatgcttggtttaggtgccatctttgctgttattatgtatatgggatcacctgtttttgccagtatgagccgtggcggtcaagacttagtacctgttcttagaagtttaactttggcagttcttgtttttccgtccatgagcgttttaagaggcttttttcaagggtttaataatctcaaaccttatgccataagtcaaatagctgaacaagttgttcgggttatttggatgcttttaacagctttctttatcatgaagatgagctcaggagactatgttgacgcagtaacacagtctacttttgctgcctttgtcggaatgtttgcagggattgccgttcttatttatttcctatgggaaaacgatttgttagatgccttatttggcaaaaagcctgaaaaggttgatattgataccaaggatctccttattgaaacagttaaggaggctattccttttatcgttacaggttcggctattcaggtttttaaactgattgatcaattcacttttggcaatagtatggctcttttcacacattatagtgatagagaattaaaagttatgtttgcctatttttcgacaaatccaggcaaggttacgatgattttgattgctgttgcgacagcgattgcaggtgtcggtattcccttgttaacagagaattttgtcaaaaaagataaaaaagctgcggcacgcttagttgttaataatttacaaatgctgatgatttttatcattcctgccattataggagctgttattttagctaagccgctctatactattttttacggtctgcctcagggacaagcgttagggctattcatcgtttctttactgcagacaattattttagctatctatacggttttagctccgatgctgcaagctttatttgaaaatcgtaaggctattcgttactttatttatggtgttattgctaaatttgttttacaagttcctctcatttatttcttgcaggcctatggtccaatattagcaacaacgtttgccctattcattccaattattctgatgtaccttcaaatacaaaaaattacaggctttaatcgtactgccattagaagaacaagccttttagtgttgattttgacagcaatcatgactattgttgtcgttttggcaacttggctgctggggctaattctatcagataatagtcgaatcgctagtcttatttacattacagtgattggttttattggtatagttgtttatggtatcttggctttagctactcatcttcttgataaaatgttgggtactaaggcggtcagccttcgtcggaagctgcatatgaattaatgagctgtcccaatggtttttcattgggatttttggatcctcgcaaatcactaactatattagtagtgccgtagagcttctagcatggtaataaaaaaactaagatggtaagtttgcttatagtttctttttatagctaactatcaagaaatagaatagggtaaaagtccgtcatttttgggaatacgtggtaaaataattgcattagattcgaaaggtaaaaacgatgactgaagactataaattagatactattctggcacatgcaggaattaatacggacaagacaacaggagctctgacggctcctattcatttgtcaacaacttatcagcatcctcaatttggtcaatcaacaggttttgattacacacggacaaaaaatcctacccgcactgttcttgaagaaacgctggctaaaattgaaaaggctaaatacgctttagtaacatcgtcgggtatggcggcgcttgttttgctttttactggctttcctattgggagtaaggtagttgcggcgcgtgatttatatggtggttcttttcgttggtttaacgaacaggaaaaagcaggaagattttcttttgtttacaccaatacagaaactgatatgattgctgccatttcagatgagaccgattatgtttttatcgaaacgccaaccaatccgctcatgattgaatttgacattagtaaagttgctcaagcagctcataagcatggtgccaaggtcattgttgataacactttttacagccctatttatcaaaatccgctcgttttaggtgctgatgtggttttgcattcagcaaccaagtatctatcaggtcataatgatgttcttgccggtgttttaatgaccagcgatcaagaaatttacgataagcttttttatgaccaaaatacaacaggtccaacactctcgcccttagatgcttatttgctgatgcgcggtctgaaaacacttaaattgcgtatggaaaaagcaacacaaaatgctaagacagttgttgcttatttagaaaaatcacctgctgttaaagaggtactttatacaggaaaaggcggaatgatttcttttaaagttgtggatgaaaaaaaaattccgcaaattctcaatcatttacagctgttcacctttgcagaaagtttaggtggcgttgaaagtttaattacttatccagcgacacagacacacttggatataccggaggaagtgcgtcattcctatggtttgacagatgacttactgcgtctgtccattggaattgaagatgcggaagacttgattgatgatttaaaagttgctttagaagcttaaaggagataaaagagatgggacgatatgattttacaacaagacctgaccgtcttaaccaatttacctataagtggaaaacttctgaaaataatccagaacttctccagatgtgggtggctgatatggactttttgcctgtaccagaaattaaagaagctattattaattatggacgagaacatatttttggttataactattttaacgatgacctctatcaagcggttattgattgggaaagaaaggagcatgactatgctgttgtaaaagaagatattcttttcattgatggcgttgttccagccatttcaatagctctgcaggcttttagtgaaaaaggagatgctgttttaattaactcacccgtctattatcctttcgcacgtacaatcagactaaatgaccgtcggttggtagaaaattctcttcaaattattaatggacgtttcgagattgattttgaacagctggagaaagatattattgacaataatgtcaaaatttatcttctttgcagtcctcataatcctggtgggcgtgtttgggataatgatgatttgatcaaaatagctgagctttgtaagaagcatggtgtgattttagtttctgatgaaattcatcaggatttggctctttttggaaatacacatcattccctcaacactttagatgcttcatacaaggattttacgattattctaagttcagcaactaaaacttttaatattgcaggaactaaaaacagctttgctattattcaaaatgagagtttgcgtcgaaaatttcaatataggcagttggctaacaatcagcatgaagtgccaaccgttgggatgatagcaactcaagcggccttccaatatggaaaaccttggttggaagaactcaaaacagttattgagggaaatattaaactggtcataaaggaattagaagcaaaaacgaaaatcaaagtgatggaacctgaaggtacttatttggtttggctggatttttctgcttatgctattgctcagcctcaactgagtgaaaaactgcaaaatgaagcaaaagttgtcctcaatgatggtgcacacttcggtaaggaaggcaagtactttgctcgtcttaatgttgcgacacctaagaatacagttcaagaagcactaggtcgcattatcagtgtctttggaaaataaaaaatatttttaaaacattcttgaaattggcaaatcctgtccgatttttggaatgtttttatatacagttacttttatcaaaaatatctttttgatgacttgattttttgctatctctgcttatttgtacattatggtagctatagttcttgccttgttgaggttttatatctaatgtgctatctgttacttcttaaaaagaggaacaaattaggtaatggcttcctctaaaatttaagatttgattggaatttatcggcttttttatgctataatggtcacagaaaatacaaaatagaaaaaggatacattatggggaaatttcaaatcatttcgcatccgctcattcagcacaaactctctattttacgtcgtaaagatacttcaacaaagcattttcgtgaattagtcaatgaaattgctatgcttatggggtatgaagtctcccgtgaattgccgctagaagaggttgagattgaaacgccgattactaagactgtacaaaaacagttgacaggaaagaaattggccattgttccaattttgcgtgctggtattggtatggttgacggactcttgaatttggtaccagcagctaaagttggtcatattggtatgtatcgtgatgaagaaacattggagccggtagaatatctggttaaattacctgaagatattgaccaacgtcagatttttgtggttgatcccatgttagcaactggaggttcggctgtcttggctattgattctcttaaaaaaagaggagcagccaatatcaaatttgtttgccttgtttcggctcctgaaggccttaagaaattacaggaagcacatcccgatattgatatttatacagcggctcttgatgaaaaactaaatgaaaagggctatattgttccaggtcttggggatgcaggcgatcgcttgtttggcacaaaataacagtccagtggactgttatttcccgagcctgaaatgagatagcgaggctaagtccagtggactgttatttcccgagcttaaaatgggataacgaggttaagtctgataaattttgcttttaaggattttaaaagggaattgtcacaagaacagctcaggggttaagagttacttgatagatcctcactttaaaaaagttgtcaaaaatcaatgtaaatatttgaccttttttgaccaataggatataataactccaagattgaattaaaggagaaatacagtatgattcctgtagttattgaacaaacgagccgtggtgaacgctcttatgatatttattcacgtctattaaaagatcgtattattatgttgactggtcctgttgaagacaatatggcaaattccattattgctcagttactgtttcttgatgcacaagataataccaaagacatttatctttatattaattcaccgggtggttctgtttcagctggtcttgctattgttgatacgatgaactttattaagtctgatgttcaaacgattgttatgggtattgctgcttccatgggaacaatcgtcgcttctagcggtgccaaaggaaaacgttttatgttaccaaatgcagaatatcttatccatcagccaatgggcggtacaggcggtggcacacagcagtctgatatggctattgctgccgaacaattgcttaaaacacgcaaaaaattagaaaagattctatcggataattctggaaaaacaataaaacaaattcataaggatgctgaacgtgattattggatggatgctaaggaaacattaaagtatggcttcatcgatgaaatcatggaaaataatgaattaaaataagtaggaaaagctgagttataatgacttagctttttaagttgagtagaaaaaccatgattttctgaaaagaggtaataaacaaagcggaaaatcatttttttgttataatagaaatatgttaaaaattaacagtcaattatttgcaattgaagatactcttgatgatcttgcggctgcttttttaaatttggaggtggtcaggacgtacaaggcagctcaaaaagcatttttagctgataaacatttgcaaaaagaaattagtaattttcaacattataatgaagattacaatgatcaaaaaacttttattaaataccgtccggaagtaaagcaattgaggcgaaagatatttgaaaaaaaacgtcagcttgatttgaacgaaaaagttattgcacttcgcagagccgaagtggatttacaggaagttctagctaagattgctcaaaaaatagcagaatctgtttcatctgatgtttttgtagatacgggtttaccgctggcaccgcataaaccacctcacaaaaaaggatatggcaataatattaaggaaagataagagaaaatgtttgaaaagaaaaaaagactaggtcttattgtttatctttattataatcgtgatgccagaaagcttaataagtatggcaacgtcgtttaccattctcggcgaatgcgttattcagtactctatattgctcaagacgaaactgataaaattattgaagagattggtgctcttaaatttgtcaaaaaggttcttccatcctatattgatacgattgatcaaaattttgtaggcagtttaatgcgctaagagggcacctataaaaaatgaggaaatatgcttgacaatattcagataattcagtattcttattgatgactaatatttaagataaatttaaggagaaaacatatgaagaaaaaaatagctctagcagctctttcttttgtcagtgcagctgttcttgcagcttgcagctcagcacctggtggttcatcagatgcagctggtaataaaattggagatactgtaaaaattggttacaatcttgaattatcaggagatgtagccgcttatggacaagctgaaaagaacggtgctaaccttgctgttgaagagattaataaggcaggcggcattgatggcaaaaagattaaagttatctcaaaagataataaatctgataacggtgaagcatcaacaatctcaactaatcttgctacccaaagtaaagtaaatgctatcttgggaccagcaacatctggtgctacagcggctgctgctcccaatgccaacgatgctgcagtaccactcgtaacgccttctggaacacaagataatttgacctattcaaaaggcaaagttcaagattacatcttccgtacaacttttcaagatagcttccaaggaaagatcattgccaaatatgcaacagataatttgaaagctaaaaaagtagcgctttactatgataagtcaagtgattacgcccaaggtattgctgatgcattcaaaaaagcatataaagggaagattactgttgaagatacctttcaagctaaagaccaagatttccaagcagctctgaccaagtttaaaaataaagactttgatgccattgtgataccaggttattatactgaaactggtctgattacaaagcaagcacgtgatatggggcttacccagcctatcttaggacctgatggttttaatgatgaaaaatatgttgaaggtgctggtgcagccaataccaataatgttcattatgtatctggttactcaacaaaagttgctttaacaaataaggctgaaaaattcctgaaagattataaggctaagtatggtgaagagccaaatatgtttgccgctcttgcttatgattccgtttatatgattgctgatgctgcaaaagatgccaaaacatctaaggatattgcaacaaacctagctaaattgaaaaactttaaaggtgtgacaggtaaaatgacaattgataagaaacataaccctgttaaatctgctgttatggttggtcttaaagatggtaaagaagacacagctactgctgttgaagcaaaataaagacagaataggtctgaaacaatgaacatctggggaacgtatccccagatattatttatttatagaaagtttggtagaataatatgctccaacaacttattaatggtcttatcctagggagtgtctatgcgctgttagcccttggttataccatggtttatggaattattaagttaattaactttgcccatggagatatttatatgatgggagcctttattggttattttcttattacaaaatatcatatgaatttctttgtggctcttgtgctgacgatggttttaacagctatcttaggggttgtgattgaatttctggcttatcgtcctttgcggaattcgacacgtatcgctgctttgattactgccattggtgtttctttttttctcgaatacagtatggttcgtttagttggtgccaataaacatgcttttccccaaacccttgctacagtgaaatataatttaggtcctgttagtgtaaccaatgtacaactcatcattttaggagtctctatcttcttgatgttggctttgcagtttattgtccaaaaaactaaaatgggtaaagccatgcgtgccgtttcagttgacagtgatgctgcgcagttaatgggaatcaatgttaatagtactatcagttttacctttgctttaggttctgcacttgctggtgctggtggtgtcttgattggactttattataattctgttgatccactgatgggaatggttcccggtattaaagcctttgtcgccgctgttttaggcggtattggtattatcccaggtgcagctgtcgggggctttatgattggtcttttagagacgttttctgtttctatcggtcttgcaagttacaaggatgcagttgtctatgcagtgcttatcattatccttttagtaagaccagctggtattttaggaaaaaatgtgaaagagaaggtgtaagcaatgaaaaaaaatttaaaagcaaatataacttggcttgccctagtccttatcatcttttttcttctttttggacttattagtgctggtatcatagatatttactatactcaaattctcatgggaattgggattagtattatcatggcactcggaaccaacttagttcttggcttttctggacagctctctcttggacaagctggctttatggccattggtgcttatgcaactgctattttaacaactcaaaatcctacttatgcaggtttctatttatccattattgtcggtatgatagtgactgcaacggttgccttggttgttgggattccaacacttcgtttgaagggtgattacttagctattgcaactcttggtgtagctgaaattatccgtaaactgattgaaaatggtggtgatttgactaatggttctaggggaattatgggaattctcaaatacaccacttggccagtcgtctttgttttcgttgttttgattaccatttttgtgttaaattatctgaggagtcctatgggaagagaagtacttgcggttcgtgaagatgaaattgcagcagaagctatgggggtgaatacgacaaaaattaaggtacttacttttatgattgctgcagtaatttccagcattgcaggttccctttatgtcggttatattggtacagtcgctcctaaagattttaccattatgaaatcaattgattttcttatcgtggctgttcttggtggacttggctcagtaacaggaactattgtggctgctgttgttttgggtatcctcaatatgttcttgcaaaatgtatcagatattcgtatgattatctattcgttagctttaattttggttatggtctttagatcaggcggtcttttaggaacatgggaattcagtttttcaagacttttcgctaaaaaagctaaggagggcgacaaataatggcacttcttgatgtaaaaaatttaacaaaaaatttcggtggtctgacagctgttggggatgttactctggagcttaatgaaggagaattggtcggtctgattggtcctaatggggcaggtaagactacactttttaatttattgactggtgtctatgaaccaagtgaaggaagtgtggaacttgacggtactcttttaaatgggaagacaccttataagattgcttctttaggactatctcgtactttccaaaatattcgcctctttaagaatatgaccgttatcgaaaatgttttagtcggtatggaaaatacgcgcaatcctcatctcttttcgagttttctgcgcttaccaagtttttattcaaatgaaacggacttacaggaaaaagccattgaacttctaaaaattttcaacttagatgacaaggctgatactttagcgaaaaatcttccttatggacagcaacggcgcttggaaattgtgcgtgcactggctactaagcccaaaatcctctttttagatgaaccagctgcagggatgaaccctcaagaaacagctgaattaactgaattaattcgtcaaatcaaagaagagtttagtattactattatgttaattgaacacgacatgagtctggttatggatgttactgaacgtatttatgttttggaatacggacgtctcattgctcagggaacaccagaagaaattaagcacaacaaacgcgtaattgaagcttatctaggaggtgaagcctgatggcgatgttaaaagttgagaatttatctgttcattatggtgttatccaagcagtcaaagatgtgtcttttgacgtcaatgaaggggaagtcgtttctcttattggtgccaatggtgctggcaagacctctattttacgaactatttctggtttggtgcgtccaagttcaggggaaattaattttttaggaaatgatattcaaaaagctgcaactcgaaaaattgtagcttctggtctgtctcaggttccagaagggcgacatgtttttcctggtttaacagttttagaaaacttagaaatgggagcttttttgagcaataatcgtgaggaaaatctagcacgcttaaaaagagtgtttgaacgtttcccgcgcttggaagagcgtaaaaatcaagatgcagcaaccctttctggcggtgagcagcaaatgcttgccatggggcgtgctctcatgagtcagcctaagctgcttttgcttgatgagccatctatgggattggcaccaatttttatacaagaaatttttgacatcattcaagatattcaaaagcaggggacaacagtgcttttgattgaacaaaatgctaagaaggctctgtcaattgcagatcgtggctatgttttggaaactggaaagattgttctttcaggtacaggcaaagaattattggcttctgatgaagttcaaaaagcttatttaggtggataaaaagaaagagtggcagaataagaattggcacattcgttttctgctacttttttatcaattaaagtgttaatgacttgaatatgctataatgaaagaaaaagagtgaggttttattatgccagtaaaggattttatgacaaggagagttgtttatatttctccagatacaactgtagccaaggcgacagatatcatgcgtgagaaaaatttgcgccgtcttccggttattgaaaatgatgttttagttggtttgctgactgagggaactatcgctgatgctaatccatctaaggcaacgagtctttctatttatgaaatgaactatcttttaaataagaccaaagcccgcgatgttatgattaaagatgttattacggtttcaaaagatgctcgtttagaagatgcgatttatattatgatgaagcataaaattggtgtcttgcctgttgttgatggcaatcagatgtcaggtatcatcactgataaagatgtttttcgtgcctttttggaagtttctggttatggtaaagaggggatccggataagacttttagctgatgataaagttggtattttagaacaggttgtaaaagatatttctgatgaaaagctcaatattaagcggattgttgttgctggacgtcgggaagataaggttatcattgagattcagattgatggtagatttaccagtgaatctctaaaacaaaaactgcttaatcaaggctttacaattgagtctattgaacagactgaaagaaagactgatttttaattggttctgccatttggcagtgcctttttttcatatttttggtaaaatagaaataatcataataaaaggaaatctaatgacaaagggaatttttatttcatttgaaggaccagatggagccggaaagacgacagttttagaggctattttacctcaattaaaaaaacttgttgcaaaagaggttatcacaacacgcgaacccggtggtgttgctattgcagaaagtattcgggatcttattcttgatgttaatcatactaatatggacgataagacagaattacttctttatattgcggctcgtcgtcagcatttggttgagaggattttacctgagttgaaaaaaggcaatcttgttcttgtggatcgttttattgacagttctgttgcttatcaaggctatggcagaggacttgatgctgatgcagttacgtggctgaataactttgcaacagatggtttgcaaccagatctaacactttattttgacgttgattcacagattggtcttactcgaatcgagaagaataaagagcgtgaagtcaatcgacttgatttagaacaattagatatgcattgccgtgtacgttcaggttatttgaaattggctcaggaaaatcctgatcggattgttaccattgatgcggctcgtcctttggaagaagttattactgatgccttatttataatcaaacaaagatgtttagaaaagtaagaaataattaatatggaattagaaaaactacagcctaaaatttttcaagaatttcagcgaattttacaatctggcaagctgagccatgcttatttgttttcgggggattttgctagttttgaaatggctgttttgttggctcagagccgtttttgtgacagtcctattgatgctcttccttgtgggcagtgccgttcctgccggttaattgctgaaaatgatttttcggatgttaaagtcattgaacctgaagggcaaatgattaaaacagcaacgatccgtgatttgctgcgtgaattttccagttcaggatttgaaggacagtcacaggtttttattattcgtgatgctgataaaatgcatactaatgccgctaatagcttgctaaagtttattgaagagccacaaagtgatacttatatgattttattaactcaagatgaaagtaggatattgcctacgattaaaagtcgaactcaaattttctattttcctaagaatagggcttatttaatccaacagttagaacaggaaggactactcaaaagccaagcagaaatactagcggatctatctaaagatccgacacaagcaaaagaatttgcacaaaataataaattgctggacttgttaaaagcctgtgaacgttttaccgctatcttatttgacagtaaaaatcttgcttatttagaagtgtcacggttggctcagctagctagcgaaaaatccgaacaggaatgggtctttcaattgttaactttctttttatcaaaaaattatgataaaagggaaactttaagttacttagaagctatttatcaagccaaaaaaatgtggtttagtaatgtaagttttcaaaatgcactggaatatatggtgataacatgatagaagtaattggtatcaaatacgaagaaacggatagcattagttatgtactgcctgatcggacctatcaaaaggatgatttccttgtcgttcagaatcgtaagggaagccgtttagcacaagtcgttcaggaaaattttgctatgtcagccgacaagcttccagacatagagcaaatagataaagttttgagaaaggcagagcaagcagatattgagacttatcagaacaatttaattttagcagaagaaagttttgctaaagttaatgcacttatccaaaaaaatcaattagaaatgaaattgattgatattgtttttcctttggaacgtcggcaagtcttgattacctttgttgcagagcatcgtgttgattttcgtcagctcttaaaagatttggccaatttttttaaagcaaggattgaattacgccaaatcaacagtcgtgaagaaagtaaaatttatggcggtctgggtccgtgcggccgtgctctttgttgctcaagttttcttggtgaatttccgccggtttctatcaaaatggcaaagaatcaaaacttatctctgaattctgggaaaacaacgggagtctgtggccgtctcatgtgctgtttaagttttgaagatgatttttatcgtgcatccaaagaaaaatttcctgatttaggcactaaggtcaatactcaaaatggccaaggtattattgctggtattgatgttatttctgaaactgttaaggttcgttttgaagaaactcctggtcttttgacctatgcattagaggaggtcaaggtcaatggataaaaaagacttatttgatgtttttgatggtttttcacaaaatttgatggaaactttggctgaagcggaagccttaaagaaacaagtgcaggatttagtagagcaaaatgcgtctttacgtttggaaaatgataagctaagagaccgtcttagccattttagccagatggaagaaagtgatcctagcagtaaggcaattagttctagaaaagaaaaccttgaaaacatttatgaagatggtttccatatttgcactttcttttatgggcaaagacgagaaaataatgaggattgtgctttctgtatggaattgttgtatcgagagtaggtcttatgcaagtacaaaaaagttttaaagaacaaacagcttatgggaagctttatctcgtgccaactcctattggtaatcttcaagatatgacttttagaagtattgctattttaaaaaaggttgattatattgcggcagaagatacccgcaacacaggactcttgctgaaacactttgatatttcaacacgtcagcttagttttcatgagcataatgcttttgaaaaaattcctgatcttctgaagctcttgaaatctggaaactctttagctcaagtatctgatgcgggtttgccaagtatttctgaccctggatatgatttggtgcgggcagctattcaagaagatatagcagttatagcacttccgggagcttcggctggcattactgctcttattgctagcggtttggctcctcaacctcatattttttatggttttttaccacgcaaatctggtcaacaaaagtctttttttgaggaaaaaaagtattacccagaaactcaaattttttatgaatcgccttatcgggttcaggaaactttagaaaatatgctggctgtctatggtgatagacagatagtattgaccagagaattgaccaaactttatgaggaatatcaaagaggaaatatttcagaaatcttaacttatattgcagaaaatcctcttaagggagaatgcctcttactggtatctggctatgatcatcaagaaaaagagcagcaggtaagtgaagttgaactgaaacatttggttgaagctttagttaaagaaggtatgaaacctaatcaagctatcaaaaaagtagctaaagagaatgatttcaatcgtcaagaactatatcaactctatcatgaattacagtagacagtttcgactgtcttttttctttgagtattagttcgtctcgctctatgatcttcgtaattcataaactatcgattgataagagtcatgattagatagaaatgttaaaaaacataacatataacgaaaaagataaatggtcactggaaatagttgaaataagctttagagccctagtactataatattttcaaataatataagatgttatattctctgaatttttagaaaatttcgccaaaaaatcttttattttcctgaaaatatgttatattatataacataaagggaggtgctgatagatatggattcaggatctatagcatttattatcatttgttctgcgcttgtttttttaatgacaccgggtttagcctttttctatggaggcttgggacgccgcaagaatgtcatcaatacaatgatgatggcagttgtgccacttgctttggcctcgcttttgtgggtagttgtaggttattccttatcttttagtggtgttggaaaagtatttggtgatttttcacatgtctttttgaatggtgtgaaggaaggagcaagtagtagagggttaacaataccagataccttattttctggttttcaaatgatgttttctatcattacagtagctattttgacaggtgctgttgcaggaaggatgcgtttcactcctttagttatttttattatcttttggttacttttagtctattatccttttgcacacatggtttgggatgatggtctattagcaaaatgggggacgcttgattttgccggtggtgatgttgtccacattacatcgggcgtttcggggctggtattagccttggtagtcggtaaacgtcgcgattatgaccgtctggaatatcgtccacataatattccctttgttcttttgggagcaggcctactctggtttggttggtttgggtttaatgcaggttccgctttagctgctaatggtttggctgttcatgctttgttgacaactcatatttcagctgccgctgctatgttctcatggctgctacttgaaaaatatttaaatggtaaaccttccttagtaggcggttcaactggtttagtcgcaggcttagttgctattacaccaggtgcaggctttgtacccttatggagctctttgttgataggactcatggttagtcctctatgttattttgctatcgctgtgttgaaaagtaaatttggttatgatgatgccttggatgcttttggctgtcatggtataggtggtattttcggagggattgtaacaggactttttacaacacctcatctggctttagataaatccaatattggtcttatttatggtaatgcaagattatttttagttattctggcagctattctttttacgattatttggtcagctctgattagttttttaattataaaagttatttcccttttcatgccaattcgtgtcagtgatagagaagaagctactggacttgacgacaaagagcatggagaaactgcgtatccaacctttatgggacttgattcttaggagaaaggaagtatcatgaaaaaaatagaagctattattcgctctgataaactagaagatttaaaagcagccttggttcagtcaggttttaccaaaggaatgactattagtcaagttctaggatttgggaatcaacgaggttatacagaatatgtccgtggtcaaaagatcactccaacgctcttagccaaagtgaaagttgaaattgttgctcatgatgcagcagtcgaagaaatgattacgaccatcagccaagcagtaaagacaggagaagttggtgatggtaagatatttgtcagtccagttgatgaaattgttagaattcgtacaggagaacgtgatggtgatgccatttaagttgcctgtctttgctattaatattgctgctcaaagaaagatttaagctttttgataagcacgtcctaaagataagttaagcttttcgtttttaggatgtgctttttttgaaaaacaaatttttgaggtatgaattttaaaaacttgtttttaaatgaaattagtttacaaaattctgaaaatttgtgatataatttacttactttaaggaggtatcagatgacaatttataatttttctgcaggtcctgcagtcttgccaaaaccagttcttgaaaaagctcagactgaatttctagattacaatcattctggcatgagtgttatggaattatcccatcgttccaaagattttgatgacatcattaaagatgccgaaaaattacttcgtgacttgatggctattcctgataattacaaggtcatgttcttgcaaggcggagcttcgacacaattttctatgttaccacttaatcttgcacagggacgtaaagcttattatgtggttgcaggatcctgggggaaaaaagcatatgcagaagctgtaaaattgtccaaaacgattccttttgaaccaatccttttggcttcatcagaagagacaacttatgatcatatcccagaaattgattctgcaaaaattgataaagatgctgcttatgtgcatattacgactaataataccattgaaggaacttctatctatgatcttcctgaaacgcatggtgtgccaattgtagctgatatgtcttccaatattttagcagttcgttataatgtcgctgactttggcttgatttatgcaggagcacaaaagaatattggacctgctggggttacgattgttattgttcgtgaagatttactcaatgacgagcccgttctttctagtatgttagattatcgtattcaagctgaagccggttcgctttataatacaccaccaacttacggtatttatattgctaaacttgtcttcgaatggcttaaagaacttggtggtgttgatgaaatggaaaaaatcaatcgtgaaaaatcaggccttctttatgatttcattgaacagtcagatttttatactagtcctgtcaagagtcctaaagatcgctcagtagccaatatcccatttgtgacaccatctcaggatttggatgctaaatttgtcaaggaagctgatgcgcttggtttcaagaatatcaaaggtcaccgaagtgttggcggtatgcgtgccagtctttacaatgcctttccacgtcaaggtgttttagatttgattgacttcatgaagaaatttgaagcagaaaacaaataataacacagaacttccgtaggaatattgctggtcaatccctttaggaggacaccgttggttattctcgtcttgtcattattggtgattcgattgaggtcaccggaacaatagctattaatgatgaaaaccttgtgctgttggcatgcctatgaacaaacgcgtttcgttttgcagtctattatggatttgtttactaaagaggaacttccttttgaaaatctctatcggacacatatgtttgtcactgatatttcatgatgggaagaagtcggacgtgcgtatggtgaatttttcaaagaggtaaaacctgtggctactatggtagaggtgccttcgttgattggcaaggacttactagtcgaaattgaagtttttgctaaactagaaaaataggggtaacagataagaatggaaattagacaagctttccccaatgaagtcgttgccgtaatggcagtcctcagttctgccaagcaatttttagcagaatcaggatctagtcagtggcagggtgaaaatggttaccccaacgaagacgatgtctttgatgacattttgcaggggcaggcttatgtggcggttgttggtggacaaattgtggcttatgctgcagtcattgatggcaaagatgaggcttatgacaaaatttatgatggcaaatggcagcacaacaactatcgttatatcaccatccatcgtctagctgtcttgcgagattttgcgggtcaagggattgctcagactttcttgcagggtctgattgaaggtcaggctggttcagatttccgtattgatacgcatgaaaagaacaaagctatgcggcatatcgttgaaaaattaggctttgtctattgcggtaaagtaccaattgatggtgagcgtttagcttatcaaaaaatcaaacagaataatgagaatgctctctatcaagaaattgatgaagcagattatcatggcttttaaatttcaattgtcagctgctagtagagcacttaaatagggtagaaagagagacctgagctaatcaggttctattggtgaatgaaaaatggtctatagtgttaaaacctttaataatattaaccaagtcggtttaaaagaacttggcaataagtttcaagtagatggagatttagcagaaaatccagatgcttatattattcgcagtcagaatttacatggggttgattttcctaaaaatctgaaagccattgcacgcgcaggtgctggaacaaataatattccaattactgaagcgacagaagcaggtattgttgttttcaacactcctggtgctaatgccaatgctgtcaaagaagcagtaattgcttctcttctcttttcagcgcgtgattatatttcagcgaatggctgggttaatactttaactggtgatgatgttcctaaacaagttgaagctgggaaaaaacaatttgcaggcagtgaaatcgctggaaaaaccttaggaattattggtctaggtgcgattggtgctcgtattgctaatgatgcccgccgtttaggaatgaatgttcttggttatgatccttatgtttccattgaaactgcttggaatatctccagtcatgttaagcgtgtcaatgatttaaaagatatttttgagaatagtgattatattaccatccatgttcctttaaatgatgaaactaaaaatacctttaatgctgatagttttgctcttatgaataaagggacaactattatcaattttgcccgtggtgaattggttgacaatgaagcgctgtttgaagcgcttgaaacaggcactgttaaacgctatatcacagactttggtactgaagaattattaaataagaaggggattactgtctttccacacgtgggagggtcaactgaagaagctgaactcaactgtgctattatggctggtaagacgattcgtcggtttatagagacaggagaaattactaactctgtcaattttccaaatatgcaccaaactttaaccgcaccttatcgaattaccttaattaataaaaatgttcctaatattgtagcccgtttgtcaactgcagtttctaatttagatatcaatatcgccaatatcttgaaccgttcaaaaggagattatgcctataccattttggatcttgatgaaacagataaggcaaaaattgatgacctagttgctaattttgaagcgagcgacaatattgttcgtgtacgcttaattaagggcaaaaaataagatgatatatatactaggattagggtggtgagcagttttaaccattgactgctttcgccctttttatggctgaaaaggagggaaaataatggtcctttacaagcagatttatcattctcctttgggagatttatctcttgttgcaaataatcagggtctaattggcgtttggttccttaatcaaaaatactttgaacaaggattggagggagaaacagtcatagagcaagcaaatactatcttagatcaagccaaacagtggctagatacttattttgctggggaaaaccctaatatggtaaagtttcctttgaatccacgggggactgcttttcaaaagcgcgtctggcaggccttgtctgaaattccttggggacagactagagcttatggagatattgcacaaaaaataaactgcccatccgcccgagcaattggtggatcagttagtcgcaatccgttaagtatcattatcccttgtcaccgtgttcttggtgctgccggtcaaatgacaggctatgctgctggtattgataaaaagatgtggttattagagcatgaaggctttaaagttgacaagtaatctatctttgctaagataaatttgaaaggagaacatatgctgacattttacgaatatcctaaatgcagtacctgtcgccgtgccaaagcagaattagacgatttggcttgggattatgacgcaattgatatcaaaaagaatccacctgcagctagtctaataaggaattggctagagaacagcggtctagaacttaagaaatttttcaacacatcaggacaatcttatcgtgctctgggattaaaagataaacttcatcaactaagtcttgatgaagcagcgaatttattagctagcgatggtatgctcatcaaacgcccgcttttagtaaaagaggataaaatagtgcaaataggctatcgaacagcctacaaagatcttgacttttaaagtcgagattttttctttcctttctttttcatgctataatgagttcaaggagaatttgacaattatggttttatcaaaaaaacatgctcgtaaagtattagaagaaattattgcgctttatccagatgctgttcctagcttaaattttaaaaatcattttgagttgttaattgctgttattttatcagctcagacaacagatgcagcagttaataaagtgactcctgccttatttgcagcttatccgagaccaaaagatctagctaaggctgacttgaaagatcttgaatcttatatttctcagattggactctatcggaataaggcgaaattcttaaaagaatgttcgcaacagttagttgagcattataatggtcaagtgcctcaaacgagaaaagaactagaaagcttgtctggtgtcggtcgcaagacagctaatgttgtcatgagtgtcggctttggtcttcctgcctttgcggtagacacccatgtcagccgtatttgtaagcatcacaatattgtgaaacaaacagcaactcctttagaagtggaaaagcgtgtgacagaagtactcccgccagaagaatggctgccagcccaccaagcactcatttattttggacgggaagtttgccatccaaaaaatcctgaatgtcaaaagtatccgcaattgtatgaattcgattgagcattcggtaccaataaaaataacctctgcagtgagttaattttcacttgcagaggacttttgtttataaatcaattttcagcagaataggggtatggtcttgacgagttcctgaatcaatcatttcagatttaagaattttatcgcttaatcgattgctgattagccagtagtcaattctccagcctgaattgttaatcttgctggtcttgctgcgctgagcccaccagctgtaaacattaggcacatccccatgaatatagcggaaagtgtcagtaaagccttgttccaataaatgagtaaagccagcccgttcttcatctgtaaagcctggtgaacggcgattggaagaaggatgagcgaggtcaatttccttgtgggcaacattatagtcgcctgttgccagaacaggtttttgcttatctaattgagctagataaatggcatacttttcatcccaaatttgacgatcatcaaggcgtttaaggccatcaccagcatttggtgtataaacctgagtaacaaagaaatcatcaaattctaaggtaatgatacgcccttcgtcatccatggttgcaggagcgccgatttctggataggtgatagtaggttgcaagtttgatttgtagagaaacatggttccagcgtaacccttacgcgcaggttccactgaagaacgccaaacaacatcatagtcggggaaataatccttgagaatacgcaaatgttttttcgtgggacctttggcagatagctttgtctcctgaatagccaagatatcggcatcttgttccataagtgtatccagaacagcacgtgaaagtaaagcacgcgcagaatcgctggtcagggcagcgttgagggaatcaatgttccatgagataagtttcattattaagatattaagtccatccagtaagtgatcagcataaggttatgtgcctgcacaccaactgctctatctaaatactcagactgtaggacgggctttcttcctttctagtcttgccttttatttatcattcttttattttatcaaaaaatggctgaacaagcgagtttggggtttgtaaaaagacagtcaagatgtataatactaacaaaaggagagaaaaatggtgagacttctattgcatatcattttattagttttctttatttggtacctcatcagaattcttcgtctttggggcaagcagtcggcagatgaacctttgtgggtacctaaaaaaattggtgtgggaattagtttaaatccaaggaatacgcttggtttttggataagtctgcttgtgacactatctgtgcttattatccttattgtcttgataatattttactttctggcagaaggtgagtgagagcattagtttttcttttttgggaactatttagaaaaaagtctaaataattgttgcaatttatagcaaaagtgttataatctatttagaaataattctaaatactgaaggagtcatcatgggatttgctgaaacgtttaaggctttgtcaaatccaattcgacgcgatattctagatttactaaagttggggcaattatcagctggtgaaatttctagtcattttgaactagcgggagctactatttcgcaccatcttagtgtcttgaaaaaagcagatttggtacgagaaacacgagagaagaattttatttactatgaactcaatacctcggttttggaggatatgatggtctggttggctgatttgaaaggaaatacgcatgatgaagattgataaaaaattattagtgttgacaagtttgattattctgctgcctgtcttgttaggttgtttcttttggtcacagctgccaaaaacgatagcgacgcattttgatctatcaggtcaagctaatggctttagtagtcgtttgtttgttgtttttggacttccgttttttctcttgttgcttcattggttttgtctctttatgaccagcaaggatccaaaagccaataatgttagctctaaaatgcatcgtctgatttattggattattcctttggtatcttgttttgtgatgatttcgatttatggacaggcttttggctatttgagtaatcatgttctgatagctaatcttcttataggaatcctgttgattactattggtaattatatgccaaaaacccgtcgtaattacaccataggcattcgtctgccatggactttggataatgatgaaaattggaacaaaactcatcgattggctggtaaactttgggttagcgggggtgtccttattttcatcaatgcttttgttcaaatcgtcgttttgcaggtgtttgtcatagttttggcagttatgattgtactgcccattctttattcatttattctaaatcagaagaaaaaagtataggaaattgattttacaaccgctgtgttaaactgaaatcactgcacaataaaaaagcagaacattttgaacatactttttttatccatttgggaaagagcagttcacttttgttctagctttttttgttatttcacctttttggccaacaaggtagcaaattgcatttgcaggcgattgccattggcatcggttttatgaagctgccccaaatcttcattatatttaatcagataccattctttataataatctttaagttcccccttcttaaaggtaaaaggaaaaggaatgggacaaggataggatttggtatccatagcgcaaacgataagattatagccgccaatagcagtatgtttttgcatatctttgataatatctggtacaactggtctatttaagaacataaaaaccactgttgatagaataaaatcataggtctcttgcaaatttgctgtattgatatcataccagttaatcttgcttggtagattttcttcattggctatatttttcagatgaataagactttgttcattggtatcaacagaagtgacatcatgtcctaacatggtcaaatagagggaattacgtccttgaccggatccaaggtctagtattttactgttttcttttaaataaggtgccgagaaaaggacttctgaatgtgtcttggtcatcccatattttttgttaaaataatctcccttttgacagtaaagggtaaggtgacattccaaatcattagaagcaggttcaattttatagcaaacttgaggttgaataaaaggcatttgggaatccttatcaaaagtcagcttttctaaaacatgatcatctttatcaaaaaaataaacatcaagctttccagaaaggacagttaactgttcccaagttccgactttagtgttgtgcgggtttaaaagtgtttctgggatgctattggcagtccaattaggaagacgtttataagccagcagcatatttgtatttctgttaggcatcatagttattctgtttttcatttgaattttattatagcacaagtttttgaagtatgcctagtctaacgtttttaaattaaagtcaaaaacgccttaaattatggtagaatagattatgtaataaaaagtattgaggagattaacatgaatcaaaacgagtggttaaatcaatttcgttctgtaaatggtcgtgaaccaagtcaagaagagcttcaggcagcttttcaaagaggagaattcagccaaacagttccggcagcaaagagaaaaatgaagacctctaccattgttatcattagtgtaataagtattcttgctgctttattgttgattgcaggcggaggcactgtttactactatgtttctgggaatgcagatggtgtttggaaaaatacgtactcttactattatagttctaagaaacatcgttgggttagtgcaactagagaaaataagcaaaataattttgaagatgagacattcttagatattaaaaagaattcggtaaaaacttatagttactatgttgccaaaaattctgaagactttacttcaactagcagttatagccatatccgatcaatgtataagacaaatatttggcaaagaaaatttgatctgagtattacacaagctgaatatatgaaagacatcaggaaatacatcaataactttttcaaaacacagtacacctctgaccaagatttgaaagagctgcaagataattataaaaagacctataaagaaattaaaaaaggaaaagtaacttatcaaagaaaggggaagcaactaatcgttaaaacttacaataaaaaaggtagattaatagaacaagatgtttatattaaacgaacaggaaaagcagtgacgaagttatatcacaattatcgtaaagcagaaaaagctgaacgtgcacggttagataaattaaatgcaatgtcttattaaagaacaaaaaacaatttttaatgatattgtcgttttaaactttaattgataaagaaagactagggatcaatggtcaaacagttcaaaaagttggataaccagcttcttgcggcctgtacaaatgtcctggtctttttataaccagtttattctaccgtatttacaataaacgaataatttagagaattatagaatcaatggttgtggtcacaaagattagttagattttaaagataggtaatcctttaccagaaaaggacggaattgaacaaaatttagatcagagcacatgccttcttgatggcagctggcataatggacaaaggaaacttgagagatattgcaatttttctataatagatagaggaaatgggatgacattttattcatataattatgttttaagtcgaattaatcaacaaaactggataactgtaacgatttcagctttactgcttctcgtaacaggcttttttgcctttaaagcttatcgcaacaaacgggatacaaaattccgtgaattggtaattatctctatactgtcgttgtttgcggtaattttaataggcattagtacctttcaaaccaatcaagcttccaacaatcaatttcaaacttctcttcattttatcgaagtgatttcgaaagatctaggagttgacaaatcagaggtctatgttaatacttcggcagcaacggacgggacgatcgtaaaggtcgggaagaatttttaccgagctatgagtggcagtaatcctgacaaatatttgcttgaaaaaatcgaattgcataagacgacagatatcgaattggtggaggctgaaaaatgacgttgaattatctggaaatccttattaaactagtacttggtttattttcactcgtttttgtcattaatgtgacaggaaaaggtaatctgacgccaaattcagcaaccgaccagattcaaaactatgttctcggtgggattattggtggagtgatttataattcagctattaccattcttcaatattgtgtgattttattgatttggacgatcttggttttgagtttaaaatggttgaaaacgaataatcactttgtcaaacgtgtgattgatgggaaaccgattgttttaattaaacgtggtcaattggatgtggaagcctgtcgttctgcagggttagccgcctcagatgtagcactcaaacttcgtggacaaggaatttatcaaatcaaacaagttaaacgagctattttggaacaaaatggtaaactcattgtcgtgcaggctggtgaagaaaatccaaaatatccggtcattaccgatggagtgatacaactggaagttttagaatccattgacaaaacagaagagtggttagtggaaagattagctaaagacggctataacaatgtttcggagattttcattgcagaatatgaaaatgggaatttgagcattgtaacctattaaattaagggtcacattacttgacataataaataaaaatggtatactaacagcaacagacaaggaggttttattatgggtctggaagaaaagttaaatcaagctaaaggtgctattaaacaaggtgctggtaagctcacttcagataaaaaggtcgagactgaaggtgctattgaaaaaacagttgctaaagcaaaagacagcatcaaagatatcaaggacggtgtagaaggtgctgctgaaggtattaaaagtactttttctaacaaagaataatctaaatataaaagagcagaaatcctatctaattagtagtagaattagttagaacttctgtctttggtgctcaatattaactgtagtggatgactgctaactaagcatgagagagaatcagattggttctctcttttgtgatgttcaaaacaatgagaattttcgttttgaagcccttgaaattacgaaagtcgaaaacttaacgtttaatatccttgatgagcttattgatttcctctaagttggcattggaataagggcattggtgatataagatttgtatttcagaagggttctggagactattttttcatcatgcgtttgtcgtgagaaatgataagttctttttcaaagtttgtgaaatatgctataatgaagtgttatcaatttagaggtctcatttgcctcaaactcaaaggagaaaggaattaaaaccgaacggaaaagcaaggagtttcaggtaacttatcgtttattgaaacttcaataaaataaagcttaaagcagcttgtctaggggaaaaactctttaggatttcttcattctgcccgctttttccacgtttttggtaattagtatgactgaaaaacaaccattttacattacgacaccgatttattacccgtctgggaaactccatattggctctgcctatacaaccattgcttgtgatgtcttggctcgctataagcgtatgatgaatcatgacgttttttatttgactggacttgatgagcacggtcaaaagattcagcaaaagtctgaagaagctggtatcacaccgcaggcgtatgtggacggtatggcggttggtgttaaggaattgtggaagctccttgacatctcttatgataagtttatccgcacgacagatgattaccatgaaaaagttgtggctgatgtttttgaaaaattgctagcgcagggagatatttacttgggtgaatactcaggttggtattctgtttctgacgaggaatttttcactgaaagccaattagaggaaatcttccgtgatgaagacggtaaagttatcggtgggattgcaccatcaggtcacgaagtggaatgggtttcagaagaatcctatttcctccgtctcagtaactatgccgatcgtctagtagattttttccatgctcatcctgattttatccagccagatggtcgtatgaatgaaatcatcaagaactttattgagcccggtttagaagatttagcagtttcgcgtacctcatttacttggggcgttaaagtaccttcaaatcctaagcacgtggtttacgtatggattgatgcccttctcaactatgcaacagctcttggttacggtcaagatgaccatgccaactttgataaattctggaatggtacagtcttccacatggttggcaaagacattctgcgcttccactctatttattggccaatcatgctcatgatgcttgatttaaagatgccagaacgtctgattgctcatggttggtttgtcatgaaagatggtaagatgtccaagtctaaaggaaatgtcgtttacccagaaatgttggttgaacgctacggacttgatccgcttcgctattatctcatgcgtagtcttccagtcggttctgatggcacttttacgccagaagattatgttggtcgtatcaactatgaacttgccaatgaccttggtaatctcctcaaccgtaccgttgccatgattaacaagtattttggtggtgagattcctgcttatgtggaaaatgtgacggacttcgatgctgatttggcagcagtagttgctgataatttggcacaataccacaaacaaatgaatgctgtggattatccacgcgcccttgaaacggtttggaacatcatttcgcgtaccaacaagtacattgacgaaactactccttgggtattggctaaggataaagctaagcgtgatgatttagcagcggttatggcacatttggcagccagcctgcgcgtggtggctcacctcattcagccatttatgatgaccacatcaaatgccatcatggaacagcttggtttggccggtcaatttgatttagaaggccttgaacttgcaggacttccgacaggtatcaaagtgattgccaaaggcacgccaatcttcccgcgtcttgatatggatgaagaaattgcttacatcaaagaacaaatgggtgacaactctgcgattgcccaagaggaagaaaaagaatggaacccaacaacagttgagctcaaaaacgagaagaaggctattaaatttgacgattttgacaagttagaaatccgtgtggctgaggtcaaggaagtgtctaaagtgaagggttctgacaagcttcttaagttccgcttggacgcaggggatggcgaagatcgccaaattctgtctggcatcgccaaatattatccaaatgagctagacttggttggtaaaaaactccaaattgttgccaaccttaaaccacgtaagatgatgggcttggtcagtcaaggtatgattctttcagctgaacatgctgatgggaaacttaccgtattgacggtagattcttcagtaccgaatggtagtcagattgggtaatgtggtgtctcacttgtttttgtaataataacagatgctattagtcggaagtttaaatagatattaaaaagaattcaaaagtcttttttgagcctaagcttttacatcttccaagtggtagaaataggtcttgcttcgaagttatgattaggataacaaacgggaaaaaggaagagcagaaaatcatctgtgaaattagagaaatcaattttaaagaaaaggaaagcttggaggtacttttgccttatgactcctcatcttgttttttgaaattgatgttcttatccctattttgattcatttttatcatcataaattgttacagagccttgccttatggatgctttgaatcatttagtgatgactaacctgctgaccaatttgttgtttttaattgtgggcttaggctatggtgttacctttgttttgatgaaagaaattttggctggtctgtcgttcggccacaacggcgcttctctttatgaatggcagttggttgcttctaatctttacaggagtgatagtttacgaagaagtctttgaacagtcattttcatgtttgcgtggttaaagaatctctacagtctactgttatctgtttgccttaccctgaataattagttattatatcgtatggttcaaaaatgtttccctaggaagcagaaacgaagaggtcaaaaaataaaccagaagatacagtctgtcaagcggatagtaacaagaagtcagacagaaaattgatgataggagataaaaatgaccccacaagaactatggaatcaatacaaacgagtcaacccaaacattggtgatagtatcgatgcctggcaatttggagcagaacctgatcaactggcacaattagtcctaaaaggagttaagacagcgactgcctctgcttatgatctgtataaagttgacaatgagccgcttccgcaaaaagacagttatgatgtgattctagatagtcaaaatcaagcgatttgtattattcaaattatcaaggtttctgttgtacctttcaaagaagtttctgatgaacatgcttttaaggaaggagagggcgatcgctccttgacttggtggcaggatagtcatcgaaaaatttttacccaatggtttaaagatgctgctttaacattcaaagaagatagtctgattgtgcttgaagagtttcgctgtgtctatcctcatttaacaaataaatcgaaaaatgctataatggattgaacattttgttgtccattattttttatgaaggaatttttatgacgaactatgctattatccttgctgctggtaagggtactcgaatgaaatcggatttaccaaaagttttgcaccaagtggcaggacttactatgttggaacatgttaaacgtgctgttgataccatgaatccagcaaaaacagtgaccgttgtcggtcataaagcagaacttgttcaaaaggttctagaagaccaatcagaatttgtcctccaatcggagcaattgggaacggggcatgccgttatgatggctgagtcatctttggctgagcttgaaggacaaacgcttgtcattgctggtgacacgcctttgattagaggagaaagcctgaaaaacttgctgcattatcataaaagccataaaaatgtagcgacaatcttaactgctgaagcagatgatcctttcggttatggtcgtattattcgcaatcaaaatgccgaagtaatcaagattgttgaacaaaaggatgcttctgattatgaacaacaagtcaaagaaattaacacgggaacgtatgttttcgacaataagcgcctttttgaagccttaaaagaaatcaataccaataatgctcagggtgaatattatttgacagatgttatcagtatttttaaagaggcagatgagaaggttggtgcttataaactagctgattttgacgagagtctgggagttaatgatcgtgttgctttagcaaaagcagaaaaagttatgcgtcgtcgcattaatcatgcgcatatggtcaacggtgtgactttgacaaacccagctagtacctatattgacagtgatgttatcattgcgccagatgtagttattgaggctaatgtgactcttaaaggtcagaccaaaattgaaacaggagctgttttgactaatggtacctatattgttgattcagttattggtgaaaatactgtaattacccattcaatgattgaagcttctcggattgaaaaaaatgttacagttgggccttatgcacacttacgaccaaattcagtcttagaagaagcggtccatgtggggaattttgtggaagttaaggcttcgacacttggtaaagagaccaaagcagggcatctgacctatattggcaatgctgaggttggtcatgatgttaattttggtgctggtaccattacagtcaattatgatggacaaaataaatataagacaattataggcaaccatgtttttgttggcagcaattctaccatcattgctcctttaactattggtgataatgctttgacagcagcaggttcaacgattcataaagatgtcccagttgatagtattgctatcggtcgcggccgtcaagtcaataaagaaggctatgccaagaaaaaaccgcatcatcccaataataaataggaggctgttatggattttgaagaaaagaccattaagcgccaaccgatttttaatggacagatttttaaggttgctgttgataatgttcagttacccaatcagttggggactgccaaacgtgaattgatttttcatcgtggagctgtggcagtattggctgtgacacctgagaataaattggtaatcgtcaagcaatatcgcaaagcaatagaaaaaatatcttatgaaattccagcaggcaaattggaaattggtgagaatggaacagaaaaagaagcagctctgcgtgaattagaagaagaaactgcttatacaggcgacctcaaattgatttacgaattttatacagccattggtttttgtaatgaaaaaattaagctttatttggctactaatttagagaaggttgacaatcctcgtccacaagataatgacgaggtcattgaactttttgaattaacttatgatgaatgtatggaattggtcagatcaggagatattgaagatgcaaaaacgttaattgctcttcaatactttgctctgcattttaaggataaataaggagaaatgttatgggaaagcccctgttaacagatgaaatgattgctcgagccaatcgtggcgataagttctatgataagggtcattttgactcagaagagaccattgtcatttcaacagataatcagatacctcaatcaagttatgataaaacgcgtgatttgaatgaaaactatgacgattatgattatgaagaacctattatcaaaagtcgccgcattgaaaatgcgaaacgtggtaaatttcagtctaaattaaattggattttaataggagtcgttcttcttttagcctttttagcttatgcaatctttaaactataaaggaagaaaaatgaaaattggaattattgcagctatggaggaagaattgaaactcctcttagcggaattaaatcataaaagagaagaagtctgtttagaacgaccttactacagcggtaaactaggtaaacatcaggtcgttctggtgcaaagcggtgttggcaaagtcatgtctgctatgagtgtggctgttttagtagatcattttaaagttgatgctttgattaatacaggttcagcaggagctttagcgccagatttggctattggtgatgttgtagtggcagatagactcgcttatcatgatgtagatttaactgcctttggttatgaatttggacgtatgtcagggcagcctcttttctttaaatcagatcaaacctttgtgagcgcttttgaagaggtgttggctaagcaccatattcatagtaaaatcggtctcattacaaccagtgattcctttatggctggtaaggaaaaaacgatttttgttaagaaacattttccagaagtgcaggcagttgagatggaaggcgcagcgattgctcaagcagcttatgcagccaaacgcccttttgtcgttattcgatcaatcagtgatacagcagctcatgatgccaatattacttttgaagaatttgttgttaaggctggaaaacaatcggctcaagtcctcttaaaatttttggaaatcttagactaatgacatcaaactttataaaaaaaaaaacgaaattgacattacaatcaacttcgttttttaattttattttttcttatcaaacttataatctttgataattttaatagcttttatggtaactttttcctgtggtttaccactttgatttgttttaatagcggcaattttatcaacaattttcatgccttttatcacttgtccaaagactgtgtaattgccatcaagttttggtgttccgccatctttatagctattaatgattttttgcggatagcgcgtggttgttaattgcttggattgattatctttgttttgaacaatgaaaaattggctggcattagtattggggccagcattagccatagataaggcgcctctgagatgataaaggtattttgacgtttcattggcaaatcctttgccagaatctttagacctgtctttgcccttccaaatggattcaccaccactgccatcacctttaggatcgccgccttgaatcacaaaatctgagataatacgatggaaagtcaaattattatagtagccattcttagcatgggttaagaaattttcaactgctaaaggtgcatatttagggaaaagtttaacagtgatatctccttttgaagtagcaatagtaacctcagcttcatttttagcaactttcttagataattgaggaaagtctgccttgtttaactgttttaacttatttttggctttttgtttagcaatatgatgattaacatatttatctcctttaatagcacgatctatattttcacagcctaccagcaagacaaaagatactaaaaccaaacttaaaattcttttcataattactccttggttataaaagataaatttattttatcataaaatgatgatagtatctgcttttctcaaataatataaaaatggtataatgataacatggctaaaacaaagaataaaagaaaaggacggaaaacacgccgtccaacaaaggcggaattagagaaacaaagagccataaagcgcatggtatttgctttgtttatggcttttgtcctcttttttgcaatttttaaactaggacgagtaggcgtcactgtttataatatcattcgcttgatggtgggaagtctggcttaccctttcatttttgctgctctgatttatctttttgctaccaaatggttgaaaaaacatgatggcttggttggtggttttgtcatcactatgcttgggatgcttttagaatggcaagcctatcttttctccttagcaacgatgaaagatcaaagtgtcatcaaaggcactttggtgattgtttttagtgatctcagtaaatttcgtgttgctaattttgctggcggtggttttttaggagccctcctctatatgccggttgcctttcttttttcaaatattggttcttttttaatcggcggacttttccttcttttaggtctttttctaatgagtccttgggatgtttatgatgtcatgaatttcttcaaggacagttacgctaaatggcaggttaaacggcaggaaaatcgtgaaaaacgctttgcgcaaaaagaagaggcgcgccttttggcacagcaggctgtccaagaagcacaggagtcagcaacgtttgatcatgggctcaatgcagctattgatttagaaacaggcgaggttttagatcaggcacagaccattgatttagatgattttgatggacaagtccataaagaaccagaaattattggttatcagccggatcctgagggagaagcattagaagcagaagttccagctgctgaacaaaccagtcagttaccaaaagaagaggatatgtcagatgaatccttagaggttgattttacacctaagacaactcttcattataaattgccgggtatcgatctgtttgctaaggacaaacccaaaaatcaaagtaaagagaagagattggttcgtgataatatcaagattttagaagaaacttttactagttttggcattaaggccaatgttgaacgagctgaaatcggtccatctgttaccaaatatgaggttaaaccggcagttggtgtgcgggtcaatcgtatttctaatctagcagatgatttagcgttagctttggctgctcaggatgttcgtattgaagcacctattcctgggaaatctcttgtgggcattgaagttccaaattctgaagtagctacggtgactttccgtgaactttgggaacaggctaaaacgtcgcctgataaattgcttgaagtacctttaggtaaagctgttaatggctcggttcgttcttttgacctagctaagatgcctcatattttggtggcgggttcgacgggttcaggaaagtctgtggcggttaatggtattattgccagtattttgatgaaggcacgaccagatcaggtcaaattcatgatgattgatcccaagatggttgaactgtctgtttataatgatattccccacctgctaattcctgttgtgactaatccacgcaaggctagtaaagccttgcagaaagttgttgatgagatggaaaatcgctatgaactctttagccattttggcgttagaaacattgccggttacaatgctaaggtagaagaattcaatcgtcattcagaaaacaagaatatacctttgccgcttttggttgtcattgttgatgaattggctgatttgatgatggtagctagcaaagaagttgaagatgccattatccgtttaggacaaaaggctcgtgcggcaggaatccacatgattctcgcaacacaaagaccatctgttgatgttatctctggtttgatcaaagccaatgtaccaagccgaatcgcctttgcggtttcttctggaacagatagtcgaaccatccttgatgaaaatggagctgaaaagcttctagggcgaggagatatgctctttaaaccaattgatgaaaaccatcctgttcgtttgcaaggttcctttatttcagatgatgacgttgaacgtattgtgtcctttatcaaggaacaagcagaagctgattatgatgaaagttttgatcctggtgaagtttctgaagatgataattctaatggtaatggtggaaattctgaaggagatcctctctttgaagatgccaaagctttggttctggaaacacaaaaagctagtgcttctatgttgcaacgtcgactttcagttggttttaaccgtgcaacgcgtttaatggaagaattagaagaagcaggtgttattggacctgctgagggaacaaaacctcgaaaagttttgcaaagcaattaagcaaaacaaatggttttaattgtagcaaaaattgttgaacgatcaacttatcaacttttagaataaaagaaaaacagataagcattttagtacttatctgctttttaatatgaagtgataatcagctggcaagaaaggcagcaatgacagtcgccaaataaaagaagaaagtcaaaatgaagcctgacctccaaaagaatttaaagaaccgtctgaaagaaaaggtctttctttttctgatctgacggatagccaaggttagagaaagaatggacatggccagcaaataatgcggcagaaagctgtgagtataaaactttgctgatactaagacaatttctactgcaaaaagcggcaaagcaatgtctgctaaattaataccaaagcgtctcaaatgaaaagttgaaacgataatgtaagaaaagattaacgttaaaaaaatgaaggctattgccattaatttatacatagtcataatgttattttataacgattttataagaatgtaaacgcctaaacaaaaataaaaatagaataaatcaaggaaaatccttgttttttataaagaataatgtataataaataagtatgctgtaatggtatatttgtgggaggtaaaaatctgttaattgccgaaagaaccacaacaggaggattttataatggctaaaaaagtcgaaaacatcgtaaaacttcaaattcctgctggtaaagcaacaccagctccgccagttggaccagcacttggtcaagcaggaattaacatcatgggattcacaaaagaattcaatgctcgtacagctgatcaagctggtatgattatcccagttgttatctcagtttatgaagataaatcatttgatttcgtcacaaaaacaccgccagctgctgttcttttgaaaaaagctgcaggtgttgacaagggttctggtgaaccaaacaaaactaaagttgcttcagtaacgcgtgcacaagtacaagaaatcgctgaaacaaaaatgccagatttgaacgctgcaaaccttgagtctgcaatgcgtatgatcgaaggtactgctcgttctatgggattcactgttactgactaagagtaacctgtcctatttacccgcaatacttgatcatatgtgacgagtgacgtgggagatgaaaatcgatatgaccacattacaaggagaagataaaatggctaaaaaaagcaaacaattacgtgctgctcttgaaaaaatcgatagtacaaaagcgtacaatgtagaagaagctgtagcacttgcaaaagaaactaatttcgcaaaatttgatgcaactgtagaagttgcttacaaccttaacattgatgttaaaaaagctgaccaacaaatccgtggtgccatggtattgccaaatggtactggtaaaacgcaacgtgttcttgtttttgcccgcggcgctaaagctgaagaagctaaagaagctggcgcagacttcgttggtgaagatgatcttgttcaaaaaattaacagcggttggctagattttgatgttgttattgcaacacctgatatgatggcaatcgttggtcgccttggacgtgttcttggtccgcgtaacctcatgccaaatcctaaaacgggaacagtaactatggatgttgccaaggcagtcgaagaatctaaaggcggtaagattacttaccgtgctgacaaagctggtaacgtacaggctatcatcggtaaagtatcatttgatgcagataaactagttgaaaacttcaaagctttcaatgacgttattgctaaagcaaaacctgctactgcaaaaggtacttacataacaaaccttgtactgacaactactcagggtcctggtatcaaggttgatgcaaattcattttaaataaatagtagtgaaaaagaacggcatttagctgttcttttattttaggtataaaaaaattatttttaacttgagtcgttatgaactaatacatttttttaaaaagaaaaagagactataaattttaatggaagtatgataaaatattagggataaagtaaggagtatagataatggtaaaacctaaatatagtcgtgtattgattaagctctctggtgaggctttagctggcgaaaaaggagttggtattgacattccaactgttcaaactattgctcaggagatcaaggaagttcatgactcaggcattgaaattgctcttgttatcggtggcggcaatctttggagaggcgagcctgcttctaaggcaggtatggatcgtgttcaggctgattatactgggatgctgggaacagttatgaatgctcttgttatggcagacgctctccagcatgcaggagtagacacgcgtgttcagacagcaattgctatgcagcaagttgcagagccatatattcgcggacgggcactgcgtcaccttcaaaagggtcgtattgttatctttgctgcaggtgttggttccccttacttctcaaccgatacaacatctgctcttcgcgcagcggaaattgaagcagatgctattttgatggccaaaaatggcgttgacggcgtttataacgatgatcctcgtaaaaatgccgatgctatcaaatttaatgagttgacccatatggaagttctcaaacgcggactgaagattatggattcaacggccagctcactgtcaatggacaatgacattgacttagttgttttcaatctgaatgaatcaggaaacattagacgtgttattttaggcgaacaaattgggacaactgtaaccagcagaatttctgattcagaataattgaacacggctacgacattgtgcaaaaagatagcttctgctagagtcctgagactcttcattgaacctctattttgctttgtgtcgcttacaccttagtatcttaataattgaacacggctacgacactgtgcaaaaagatagcttctcctagagttctgagactcttcgttgaacatcctattttgctttgtgtcgcttacgccttagtatcttaatataaggagaatattaaaaatggcaaatgctattgtagaaaaagcaaaagaaagatttgaacaatcacaccagtccctcgcgcgtgaattcggcagtattcgtgctggccgtgccaatgcaagtcttttagaccggattgaagtagaatattatggcgtaccaactcctctcaatcaactagcttcaatcactgttccagaagcacgcgttcttttggtttcaccatttgataaatcatcattaaaagatattgaacatgctatcaatgcttctgatattgggattaatccggctaatgacggttctgttattcgtttggttattccagccttgactgaagaaacacgcaaagagctggctaaggaagtaaaaaaagttggtgaaaatgcgaaggttgctatccgtaatattcgtcgtgatgccatggatgaagctaaaaagcaggaaaagattaaagaaatcacagaagatgaattgaaatctcttgagaaagatattcaaaaagttacagatgaagctgttaagcatattgatagcatgacggcaaataaagaaaaggaacttcttgaagtttaagatttaagcttagaagtttttgccagtcgcattaggataagatatttatagatagatcttgtcgtctcattaaaataaagggcagaagagaagggtgtggcagatccactccctttttgtaaatgtaaaggaaaggaattaaacaggggttaaaaattgaaaaatgatttgaaacaagaaagtcatatctcgttttgcagacatgcaaatcatctctttttcatttttaaaacttgaatcttattatgaattcattgcttgcaacagtcatcactgggatggtgacagatgaaaatgctaattcctattttatccagaaggatggtctaacctttgctttggataaaaaagaaggtcagcacaagattggtgatatgatcaagggctttgtctatacagacatgcatcaaaaagcacgcttgacaactgctaatatagaaacaacacgtaccacatatggttggggtacagtagctggggtgcgacgggatctgggtgtttttcttgatgttggcttgccagataagcagtttgttgtttctttggatgttttgccagaattaaaagaattgtggcctaaaaaaggggataaactttatgttcatctagaaattgataagaaagatcgtatttgggctattccagctgaaccagacgtttttcaaaaattagctggaccagcctatgataatatgcaaaatcagacttggcctgctattgtttaccgtcttaagttgacaggaacttttgtttatctaccagaaaataatatgctgggcttcattcatccaagtgaacgctatgccgaaccacgtttgggacaagttgttgatgcgcgtgttattggttttcgtaaagtagatcggacactcaatttatccttaaaaccgcgttcctttgaaatgctggaaaatgatgcacagatgattttgacctatttagaaaacaatggtgggtttatgacactcaatgataagtcaacccctgctgatatcaaagcaacttttgggatttctaaaggtcaatttaaaaaagccttgggaggcttaatgaaagctaggaaagtgaaacaagatattaacggaacagaattgattgacaactaagaaaaaatctcagattttctgggattttttggtacaataaaactattatttctgatgtgaggtatcttatggaacgtgcgatttttgcagggggctgtttttggtgtatggtacagccttttgaagaacaagatggtattttgtctgtccgatcaggctatacaggaggacatgtggttaatccgacttatgaacaagtttgctcaaaaatgactggacatacggaagctgtcgaaattatctttgatgaaagcaaaatttcttatgcagaccttgttgaaatctattggcggcagaccgatccaaccgatgcttttggacaatttgaagatcgtggggataactatcgtcctgttatcttttattttgatgagcaacagcggaaaatagcggagcagtccaaggctaatttgcaggcttcaggtcattttaacagaccgatcgtgactacgattgaagcagcgcagccattttacgaagcagaaaatgaccatcaggctttctatcggaaaaatcctgaacgctatgcgagaagctctgctattcgccatcactttttaaaggagaactggtcatgagaaaatcattttatacttggctaatgacacaaaggcaccctaagagtcacgatcctgtagctattttggcggatttggtctttgaagatacgacttttccgaaacacacggatagttttgaaagggtcagtcgctatttagaagatgaagctagtttttcttttaatcttagcgaatttgacaggatttgggaagattatttggcacattaaagtcacgcgtttagcgtgattttttggtataatgaaaagcatacaaaggtgaaaaaggagtaaaatttgcaagagtattctgttgaagtggccttggttcatccagatgatatggtcaatttatttggttctaatgagcggcatttaaaattaattgaggagaatcttgatgttgtcattcatgccagaacagagcgcgtccagattttaggtgagactgaggaagccattgaattagctcgcctgaccatcaaagcgttgttagttctggtcggacggggaatgattgtcaatacttctgatgttgtgacagcactttcgatggcgcaaaatggcaatattgataaatttgtggcactttacgaagaagaaattatcaaggattcttatggtaaacccattcgcgttaaaacgctaggtcaaaaggtctatgttgatagcgtcaaaagccatgatatcgtttttggtattggtcctgcaggaacggggaaaacatttttagcagttaccctagctatcactgcccttaaacgtggacaagtcaaacgcattattctaacacgtcctgcagtggaggcgggtgaaagtcttggtttcttaccaggagatcttaaggaaaaagttgatccctatctgcgtcctgtttatgatgctctctatcagattctggggaaagagcaaaccagtcgtctcatggagcgtgagattattgaaattgcacctttggcttatatgcgcggtcgaactttggacgatgcttttgtcattctggatgaagcgcagaatactaccatcatgcagatgaagatgtttttgactcgtcttggctttaattccaagatgattgtcaatggtgatattagtcagattgatttgcctagaaatgtcaaatcaggcttggttgatgcttcagaaaaactaaaggatattaaacagatcgatttcgtctatctttctgctaaagacgttgtccgacatccagtggttgctgaaatcatcaatgcttatgaggagtcaactgatgtccattagaaatcaaacggatacatcgaatatattctttgctatcggggcaaaattgtcagtggtatctatgatagtcgttttcttatcaactctgtatcagaagtagtggatgaaataagcagccttgttatttccctatgaaagagctaaagagatgattttagtggaggaactgggagaataaagatttactgacagatccagtaatcgctatgtacgactaactatcaacgctagaactgagaaagaaaaataaagtgactttgaatgaagttaaagacagggaacgtttccttgtctttttataatatcgctgatatgagaagtgttggttgtaacttctcttttctttagaaagcaactgcttttatggtataattaagttattaatagtcgaaagaagatgaccatgtatattgaaatgattgatgagacgaatcaggtttctgaggaaataaaaaaccaaactttggatattttggaattcgcagcacaaaaaacagggaaagaagacaaagaaatggcggttacttttgtgaccaatgagcgtagccatgaactgaatctcaagtatcgtgatactaatcgtcctactgatgttatcagtctagaatacaaaccagaaagctccctttcttttgatgaggaagacttgtccgacgatccagatttagccgaggtattaactgaatttgatgcttatattggtgaattatttatttctgtcgataaagctcgcgaacaggcgcaagaatatggtcactcatttgagcgtgagatgggctttttggcagtacatggctttttacatatcaatggttatgaccactacactccccaagaagaaaaagagatgtttagcttacaggaagagatattagatgcctatggacttaagagataataagcaaagccaaaagaaatggaaaaatagaactttaacttccagccttgaattcgctttaacggggatttttacggcttttaaagaagagcgtaatatgaaaaaacatgcagtgtcagctcttttagctgtcattgctggtttggtttttaaagtatcagtcattgagtggctttttcttttattaagtatttttttggttattacctttgaaattgtcaattcggctattgaaaatgtcgttgacttggctagtgattatcacttttccatgttagctaaaaatgctaaagatatggctgcaggagctgttcttgtcatttcaggttttgctgccttgacaggcttgattatttttgtaccaaaaatttggtttttgctttttcattaaaaatagatagaggagacatcatgtcatttaaatcaggatttgtagctattttaggtcgtcccaatgttgggaaatcgacctttttaaatcatgtcatggggcaaaaaattgctatcatgtctgataaggcacaaacaacccgtaataaaattatgggaatttatactacagataaagagcaaattgtttttattgatacgcctggtattcataaaccgaaaactgccttaggtgattttatggttgagtctgcctattcaaccctgcgtgaagtggacacagttctttttatggtacctgctgatgaaaagcggggtaaaggcgacaatatgattatagagcgtcttaaagcggccaaggtacctgttattttggttatcaataagattgataaggttcatccgaatcaattactcgaacagattgatgattttagaaatcaaatggattttcaagaaattgtccccatttctgccttgcaaggcaataatgtcagtcatctggtagatcttttggtagatcatctagaagaaggttttcaatattttccagctgatcaaatcacggatcatccagagcgctttttggtatctgaaatgattcgggaaaaagttttgttgctgacgcgtgaagaaattcctcattcggtagctgtggttattgactcaatggcgcgtgatgaggaaacgcataagatacatattcgtgcgaccattatggtggagcgtgacagtcaaaagggcattatcatcggtaaaaagggtgctatgcttaaaaagataggccaaatggctcgtcgtgacatcgaactcatgctaggtgacaaagtctacctcgaaacatgggtcaaggtcaagaaaaactggcgcgataagaaactagacttagccgattttgggtataataagaaggagtattgagatcaagctaatgtctttccagataaatagaaaggcttctaaatatggactatatttcctacatccgctcaaaagtcggtcatgacaaggttatcttgacttttgctggcgggattttagcagacaaagacgggcgtgtgcttttgcaactgcgcggagataagaagacttgggctattccgggcggtgcaatggagctgggcgaatctacgcttgacacagctaaacgtgaattttttgaagaaacaggtatcaaggtggaggctgtgcgctttcttaatgtttatagtcattttgaggaagtctatcctaatggtgatgaggtgcagactattgtcatgatttatgagtttaaggcgctaaatgattttgatatttctgattttcacaatgaagaaaccttgcgcctgcgtttcttttctgaggaagaaatagcggagctggaatcggttagtgacaagcatcgcctaatgttggctgagtattttgatgacagctttgcattgggacattaaagcaagagtgaaaaacgaggtcacgccatttcgaatcttattttgagtgtgctggtaccaatataaatgaataacgaaatgctataaggaggtcttaaaatggactatttagatatgttaattgatagtctcaatcgggctagagaacgtttttggcgtatgtttaaaggagtaacagtagagcaagctaattgttccccagttgctgatactgcaccgcagataaaatcactgacttggctagcatggcatacagcgcgtgaattggatttgcagatttcagctttggcagggcaggagtccatctgggacagtcaaggttttaaagagtattttccttttgaagtggcagaaacagaagacggttgggatcacagcttagagcaagctcaaaaaattaagatcgatcacttagatgatgttttagattatctcaatgatgctacagattttgccattctttacctgaaatcacttaatccagaatgtctagatgatattgtagatgattcttggacaccagctgtgacgcgtggtgtacgcttggtttccatcattgatgatgctgctatgcactcaggacaagctatttatgctcgtcgtttgcttggtttgaaggattagttttttgaaaaatagcagagcggtaaggacgtttagaaaagggagcaatcatgccagaattaccagaggttgaaacagtcaggcgtggcttagagcatttgattgttggcaaaaaaattgtatcggtagaggttcgtgtgcccaaaatggtcaaaacgggtgtagaagattttcagctggacattttaggacaaacctttgaaagtattggccgtcgtggcaaatatcttcttttaaatctcaacaggcagaccattatttctcatctgcgcatggaaggaaagtatttgctttttgaagatgaggtaccggacaataagcattttcatcttttctttggtctggatggtgggtcaaccttggtctatcaggatgtccgcaaatttggtacttttgaattattgcctaaaagtcaggttgaagcttattttgttcagaaaaaaattggtcctgagccaaatgccaaagattttaaactcaagccttttgaagaaggactggccaaatcacacaagttcatcaaaacactacttttggatcagcatttagtggctggacttggcaatatttatgtggacgaagtgctctgggcagcaaaagtcgatccagaacggctagccagtcaactgaaaaaatcagaaatcaaacggattcatgatgaaaccatccgtattctgcaactggctattgaaaagggaggctcgactattcgtagctataagaatagcttgggtgaagatggcagtatgcaggattgcttacaagtttatggaaagacagatcagccttgtgctcgctgtgccacgcctattgagaaaattaaagtaggagggagagggacgcatttttgcccgtcctgccaaaaataatgacaaaaattattgggattacaggcggtatcgcttctggtaagtcaacgattacaaattatctcaggcaaaagggttatcaagttattgatgctgaccaagttgtgcatgatttacaggctaagggtggtaggctttatcaggccttggtcaactggctgggcacagctattctcaatgaagcaggcgaactcaatcgtccgaaattgtcccaactcattttttccagtccagacaatttagccaaatcttctcagctacaaaatgctattatcagacaggagttggagactagacgagaccagctagctaaaacagaggcaattttctttatggatattccacttttgattgagcagaactatagggactggtttgatgagatctggttaatagcggtaagcccagagacacaaatcaagcggttgaagcagcgaaatggttattcacaagaagaagcgcagcagcgccttgccagccaaatgcccttgcaggccaaaaaagtttatgccgatcaaataattgataataataaaacagttgaaaatactaaaatgcaagtggacagtcaactgaggaggttgcaaaatgaatgacatttactttgatgacaaccgtcataactggaatgatcgcgctcgtctgcatgaggaagcaggttatggtattgataaactcttatcagatagagactatatcacaccagaggttgaacaagataaagacttgattggtgacttgaccaataaagatgtcctgcatttacaatgtcacttgggaacagatacgattagtttggcgcgtttaggagctaggcgcgttcttggtttggatctttctgatgagtcattaaggcgtgccagaaatttagctaaaaaggccggtgcttctattgatttcatagagggtaatgtttacgatgctagagaagtcattgttggtgattttgatctgatctatacttctctgggtgtcttatgctggttgccggatattactgcctggggacgcgttgtggctagtttactgaaatctggcggaaaatttattattcgtgatgatcatcccatgtttatgactattggggaagatgttcgtgatggctttaaaattgaacaaccttatttcgaacagtcacaacctatgacttgggaagatgagggctcttatattgaaacagatgcatctcttgaaaaaattaagaacacacggaatcatcaatggaatcatgctctcagtgaaattattatggctttgattaatgctggtttacaaattgatttggtatctgaatcccagcatgctgcttggaatatttggcctcatctaatggaaaagtgctcagatggcagctaccgactcaaaaagcactcagaagtcttacccttgcaatttcttatttcagcccataagccagaagcttaggtcagactatataaaccagaaaattaggacgtcaagcttcttaaattatgttataatgacatgtggtattttagaaggaagatgatcgtattataacaacagttaattggaagaaaaaccttttgatagcttggttcggtagcttttttactggagcaagcttttcacttgtcatgccttttatggctttatttgttgaggaattaggcgtaaaaggtgacttggtcaagctttatgcaggccttgcagtatcaatttcagccttagcttcagctctttttgcacctgtttggggacgtttggcagaccgttatggacgcaagcccatgatgattcgagctagtcttgtcatgacttttaccatgggcggtcttgcttttgtgacggatgtctatgggctgctttttttacgcttgcttaatgggatgtttgcgggttatgtgccaaatgccaatgcacttattgcttctcaggctcctaaaaatgaatcaggttctgctcttggaactttggctactggtgttattgctggcagtctaattggtcctcttatgggcggtatgcttgctgaatttttaggtattcgcaatgtctttctcttggttggcactttgcttttattggtaatgctgctgacaactttttttattcaggaagatttccgacctgtatctaagaaagacatcttatctactaaagaactctttgctcaaattaaagatcggcaaatactattggggctttttgttaccagtatgattattcaaatttcagctcagtctgttgcccctattctggcactttatattaggtatctagggcaaagggacaatctgatgttaattgcgggcttaattgtgtctgctatgggcttttccagcattatttccagttcaagatttgggaaattaggtgataaaattggcaatcaccgtatgttattagcaggtcttttttattgtggtattatttatttgattcttgctcagtcaaaaacacctctgcaattaggaatttggcgctttctttttggttttggtactggagccctcatgccaagtgttaatgctctattaacaaaactaacacctaaggaaggtatctctagaatctttagctacaatcagatgtttaccaactttggtcaggtattgggcccttttgtaggatcgactgtagcagcaggctggggttatcgctgggtcttttatgctacaggagcaattgttcttttcaattttatatggagtcttgttaattttagaaaatatttgaaagttagggaaatttagtgcgtatcaagattaatctgcaatgttcacattgtggcagtaaaaattatttgactagtaaaaataagaaaaatcatccagaaaaaattcaggttcctaaatattgtcctaaggaaagaaaggtgaccttgcatattgaatcctaagctgaaatatgttaaaatgactaagattatagtggaggaagtaaggacatgtacaactttttagtaacagcattgctagtgttatcctttatcttggtaattgctatttttatgcagcctcaaaagaatcctagcagcaatgtttttgataatagtggatcagaagctttatttgagcgtacaaaggctcgaggttttgaagcttttatgcagcgttttacagccattttagtcttcttttggcttgcgattgccttggcaattgttgttttatcaagtaaataaaaaggggttgggaaagtagtctcaactcctaagtttttgttagagttatttagtttatcttttatgaccttgttagatcgttttgccatattttaaatattgactagtactaaaggcaattgaaaaactataatggaaaaagactggatacagatatttgagtaatttgaagtaggctgttccgattatgcttgttttttagtccactgaacattaaagcgaacaaatttgcagaaggtgggagtataccaaggttaccacctaaaataagagagtgatgggaaccttaataatatttttaggttttcttcctctctttttttaaaatattaaagaaagaattgaaatgaaagaaaaaattgttacttatttagaagagaagggaaaatcaagtgttgatgatttagccagcagtttagatatggctggtgctcaaaaatttccttctcttatcaaggagatttccaagctcgaaagtaagggtaaattgcgctttgagcaagatggcacaatctcacttagaaagaagaaagaaaagaaagaccaagttactgttacaggtatttttcgtgctaataaggccggttttggctttgtcagtatcgacgaagcagaagaagatctttttatcggccgtaatgatgttggtcatgcagttgatggtgatacggtagaggtagcgattaaaaaagttgctaatcgccttaaaggaacggcagcagaggcgcgtgttgttaagattgttgaacacagtttaaaaacagttgtcggccgttttgttttggatgatgaaaagcccccttatattggctatattaagagtaaaaatcaaaaaattacacaaaagatttatattaaaaaagaacccattgttttagatgggactgagattattaaggtagcaattgaaaagtatccaacgcggcgttatgattattttgtggccagcgttgaggatgtgattggtcatcaggacgatgtcggaatagatgtcttggaagttttggaatccatggatatcgtgtctgaatttcctgacgctgttttaaaagaagcccagtccgttccggatgctcccagtgagaaagatctgatcggtcgagtagatttacgcaaagagattacttttaccattgatggggcggatgctaaagatttggatgatgcggttcatatcaaattattagataatggcaattttgaactcggtgttcatattgccgatgtttcttattatgttaaggaaggttcagctttggatggtgaagccctagctagaggaaccagtgtgtatgtgactgaccgtgtggttcctatgctacctgaacgtttgtctaatggtatttgttccctcaatcctaatcttgaccgtctgacgcagtctgctattatggaaattgataagcacggtcgtgtgctccattatcagattactcaaactgttatcaatactagttttcgtatgacttatagtgatgtcaatgctattattgcaggggacaaagaattgacagagcaatacgataagattgtaccgtctattcactatatggtgaccttgcacaaggttttagaaaagatgcgtgagaaacgtggagcccttaattttgatacctcagaagctaaaattttggttaatgataaaggctttcctatggacatcgtgctacgccagcgtggtttagctgagcgaatgattgagtctttcatgctggcagccaatgaatgcgtggctgagcattttgctaagaaaaatcttccttttatctaccgaatccatgaagaacctaaggctgaaaagttacagaaatttatggactatgcgagcatttttggtgtcagtattcagggaacagctagcaaaatcagtcagatagctctgcaagattttatgaaaaaaattgaagggcagccgggcagtgatgttctttctatgatgttactgcgttctatgcagcaggcgcgttattctgagtataatcatggtcattatgggttagcagcacaatactatacgcattttaccagtccaatccgccgttacccagaccttttggtgcatcgcttggtgcgtgaatacgataaagcgaattctgagaaagtggagcattttgcacaaattattcctgaaattgcgagtcaaaccagcagtttggaacgtcgtgccattgatgctgagcgtgttgttgaggccatgaaaaaagcagaatatatggaagaatatgtggggcaagaattcactggtgttgtctccagtgttgtcaaattcggtctttttgtagagctgcctaataccattgaaggtctcattcatatgacgaccctaccagaattttatcagtttaatgaacgcactttaagtttgcaaggtgagaaatccggcaaggttttccgagttggtcaatccatcaaagtaaaagtgcttaaggcagataaggaaacaggggatattgattttgcctatcttccaagtgattttgatatcattgaaaagctctctcgatcgaaaaaagagaagccgcgtccttcacgtcgtggtggcgacagcaaaacgaaggctaataagcgtagcaaacaatcagctctttcacaaaagaagaaaaagaagcctttttataaggaggcagtaaagaagggaggcaagcatggtaaaggctcaaggaaacatcgtcgctcaaaataaaaaagccagacatgactatgagattctagaaacttatgaagcaggcatcgtgctgacaggaactgagattaagagtgttcgtgcggcaagaattactctcaaagatggttttgctcagattaaaaatggtgaggtttggctaaataatgtccatattacaccttatgaacagggtaatatctggaatcaggatcctgatcgtacccgtaagctcctccttaaaaagagagaaattgcaaaattggacaatgaactcaaagggacagggatgaccttagttcctcttaaagtttatctcaaaaacggctttgctaaggttttcatcgggcttgccaaagggaaacatgattacgacaaacgtgaatccataaagcgccgcgaacaagatcgcgacattaaacggcaaatgaagcagtttaatgggagataaatagagctggacaaaattatccggctctatttacattgatataattgtattttttctggggaatagtaggcttgaaaaaatagctaaaataatgaatataattgagtaactgtaaagtttggtgaaggctttggtatatcttttcctagaataatctttaatatgcttgatcgctttgttaatctgtttattaatcgttgctagttttttctccacactggctttgactttcttgtaaatttcttgtttttgtacttgaggaagtttgcttgggtatttctgcagagtcttttgataagcctcattaatgattcctttgcgctcggttttggagaagtgattagaaaccgtctgatgactagtactttttcccaaagaatgaatcgctgttttttgaatcgtttgctgtttttcttttgaaacatcaatggttttgacctcagttttaatatagctaatcgcttcttttttggcagtgccaaggtttgtataaagacctgtgacataaacggcaacagccaagacaatacctacctgcctgagaactccagcgacactttgggacgccgttaacagattcccagtgaagtctgaggcagctaacacggtaataggaccagcgataataccgtaaccagttcccagaatcaagcaggttagagttgtctgggtgctgtcagccatatcaatttttgtaaacagaatataggcagctgccattaaggtgaaaccgctggcaatgaccagacggggtcccaatttatcaataatgaaagcagcaagcggagagaaaataaaaatcatggctgtaattggagtgactaataaagcagcttccaattccgttttactttgtacacgggtaaaataggtaggcaatacaactgttacagctaccaaaaagacattgctgagaataattgcgatagcagaacccataaattctttgtttttaaagagatttaagggaaccataggatcttgacagcctttttcccagagaatgaagagaataagcaagacggctgaactgatgagtaaggtgaggatattaaagctggtccagccccaatctcgtccttgaacaaggctcagtgtcaatgaaaaaagtgttgccatactgataagagcaccaagataatcaatcttggctttttcttttctttcttgtaaatcgagacatacaaggcaaattataaaggaaattaccatcaaaggcagattaattaggaaaatccaacgccagcccaagaactgtgtcaagacgcctccaatggttggtcctaaagcagcagccagaccttgagtaacgcctaaagctgctatgacgcttttacgcgtattaagactgacggtattgatcccaattgtcatggataaaggaaagacaatagctgctccgatactttgaatcccgcggccaaaaatgagaaagttaagatcagaactcagtgcagaaatcagagatcctcccataaaagtaagcaatcctagaagataaaatttgtgtttgccaaacttttcagccaacttacttaaagggatcgttaaggaagcaaaaataatcgtatagacatttaaagaccattgaagatcattaaggttcacttttagactgtcctgaatagctggtagggcaatattcatgacggtcgtgtccagcatacataggaagatgccgacacacatagcaataatagcaaataaacgtttcataaaaaaacacctttctttttatattaacaatgataatataaactaaattaatataattgtcaatgattgaataataataacatttatattatgattgataatataatagattgaggtggtaatatgcagggtaaagatattattttagggatattgagcaagaaagaacgttcgggttatgaaatcaatgatatactgcaaaatcagttatcttatttttatgatggcacctatggtatgatctatcctactttaagaaaacttgaaaaagatgggaaaattacaaaagaagttgttattcaagatggtaggccaaataaaaatatctatgcgatcacagaatctggcaagaaggaattggcttcttatttacagtcagatgtaaatgatgaaattttcaagtctgattttctcatgagattattttttggaaattctttaaacgatgatgatttagaacaattgataagagaagaaattgagagaaaggaagaaaaaattaaacgtttaagtgagaatcttgaaatttggaaaaagaagggagaattaactccaactcaggaaattactatcaaatatggtttagcgcaatataagtctactaaaaaagtcttagaagaagaattggcaaaatgagagaagtaattttgtcttttaaaagcacaatattataatgattaataataaatagctattggtgagctggtttatttttgtttaatcattatgttaaacagttgtctttaaaaaatatgatatattaaaaaggtcggaacgctttcgttccgaccttttatctttatatattttatttttcctgaaattgtttgagacggataacttcgatcttatagccatcggggtctgtgatgaagtagtacatctttggcttaccgggcagacctgaaaggtctgtcacagtatagccggctttttgatgcgcttgatgagtcgcttcaaggtcatcaacaccgacagcgatatgaccatagccattgccaaggtcataagcttcgtgatcgtaattgtaagttaattctaactcatagtcggggtcgtcttctagttgcagataaaccagagtaaatttgtattcaggaaaatcattgcggcgaacttctttgaagtctagtgcctcttgataaaatttaagcgaagcgtctaagtccttaacacggatacaggtatgtaaaaatttcattggaatttcctttcttttttgttaatagcagagctttaatctgaccagaagataacttcttggcgcggtttgcggctgcgaggatgtttgggatcacgcaagcgataaccaaaagaaatcatattagcgattccttctttttcaggatcaatgagccctgcctgagctaagatctgattggctttagcataatgaaagccttcaattgggcaagaatcaatgccaatcatgctggcagcagtcatcatattgcccatggcaatgtaagtttgcttggctgcccaatcaaaaagggaacgttcattggttagcgccaaatcgttttcttggaaagtttgatagagtttgaggcgggcttccaaggtttctttgtcctttaaaccgcgacggattaaactctgacgaatattttcagaatcgtagcgaacatcctttctagcaatggcgagcacaaaatggctagcagtttctagctgatattgagctccccaggcaatttctttgagctgctttttgaccgcttcattttccaaaacgataaaacgccaaggttcaagtccgatagaagaaggactgagccaagcacagtcaagaataaaatccatgtcttctttgggaattttttgatcattataaacacgtacggcaacacgatgatcaaaagcctgacggacttgttttttaatatcttctttagtcatagtcaatcactccttattttgataaatttatcataccataatttttcaaaaaagaggaataagatgccaattctagcttttatagaggttgattttgattgtccttaaagagctgcagaagcttggcagggaatggaaagaaccaagtcttttaaagggcctgccagtaccgtagctcgcagctgagattaaattatttacggctggatttcaattggtaagatgctcaggctgccctaagatgagaatttccttagtctttaaggaaattttttctattttaattttgaaattgtttgctaaaatgaaaataggaaaaaggaggtagaagtatgtctaaattacctgaaaattttctctggggcggtgcggttgctgcccatcagctagaaggcggttggcaagaaggaggcaagggaatttctgttgctgatgtcatgactgctggtcggcacggtgttgcgcgtgaaatcacagccggtgttctagaaggtaagtattatcctaaccatgaagccattgacttttatcatcactataaagaagatgtcaaattgtttgccgaaatgggcttcaaatgttttcggacttccatcgcttggacacggatttttcctaagggagatgaagcagagcctaatgaagcaggtctgcaattttatgatgacctttttgatgaatgtctgaaatatggtattgaacccgttgtgaccctatcgcattttgaattgccttatcaccttgttaccgaatacggtggctttactaaccgaaaagtaattgatttctttgttcgttttgctgaagtttgctttcgtcgttataaggataaggttaagtattggatgactttcaacgaaatcaataaccaagccaattaccaagaagattttgcaccttttactaattcggggattgtttacaaagagggagatgaccgcgaagcgattatgtaccaagctgctcattatgaactggtggcttctgcgcgtgccgttaaaattggtcatgcgattaatcccaatctcaatattgggtgcatggttgccatgtgtccaatttatccagcaacctgtaaccctaaagatatcctcatggctcaaaaagctatgcaaaagcgttattactttgcggatgttcatgtccatggtttttatccagaacatattttcaagtattgggaacgcaaggctattaaggttgattttactgagcgagataagaaggatttgcttgaaggaacggtagattacatcggcttttcatattacatgtcctttgtcattgatgctcaccgtgaaaataatccttactatgattatctagaaacagaagatttagttaaaaatccttatgtaaaggcttctgactgggattggcaaatagatcctcaaggtttgcgttatgctctcaattggtttactgacatgtatcatttaccgcttttcattgttgagaatggctttggagccattgatcaagttgaagctgatggcatggttcacgacgattatcggattgattatctgggtgctcatatcaaggagatgattaaggctgttgatgaagatggcgttgagctcatgggctatacaccttggggatgtattgatctggtttcagcaggaacaggtgaaatgcgcaagcgctacggttttatttatgttgataaggacgatgaaggcaagggaaccctcaaacgttcaccaaaattatcattcaattggtataaagaagtcattgcttcaaatggagatgacatttaagattaataaaagcagctgaaactaaaaaagtttatcagcaaatgataagtcaaaaatagcataactaaagagaagttgacatgttttccagcttcttttttattgttacagcggaaaataaagaggctttgtaaggtctttccgttttcaatacggaaaaactgtgcgtttacattttgtaagcgcttttttataatgggtatataagaaaataaaggagattagaatattatggcaaaacaagctttaattatttgcgcaggcggcatgtcatcatcaatgattgctaaaaagacgacggcccttcttcaagaacaaggtgaagacattgaaatggatgcagtgggtgttccagaagggcaaaaacgcattgaagcagacaactatgacctctaccttgttagccctcaaacaaaaatgaattttaaacagttggctgatgcagctgctaagaaagataaacctattgttcaaattccaccacaagcctacgttccaatcccaatgggtattgaaaaaatggctaagttggttaaagaaaatatctagagataaggtcacggtgtcctagatgtcaaaatggaggttatggggtgttacataaaaaagagacgcaaattatccaacttttgattaaggatgagggacaatttatcaccagtaaggcattagcagaacagttaaattgttcagacaggacgattaggacttactgcaaattgttgtctgagaaattaaaggactattctggtgttgatatcatttctaaacaaggtcaaggctatcagttcaatattaaggacagagaaaagtatcttcattttcttgaagacaatcatatcaatgatcacttattaacctataagaaggtcattgatattaatgaccgttacaattatttgctaaataagctgctatttgagcaaaatgaaatctattttgatgacttggcggatgaactctttgtcagccgttctactttatcaaatgattttaaaaaaataaggaaacgctttgttccttatcatttaaagattgaaagcaaggccaataaaggtgtttttgtgacaggaactgaacgtgacaaaagacgctttatcatggactatttcattcattctggttttattaatacgatgcagacctatattgacaatgagctgctaaatcagaaaatttcttttgaagaattaaccattattgttcttgatgagtgccgtgaaggtcatctaaagctttcagattttgtgattcaaaatttggttattcacattgctttagcgattagaaggataacggaaggctttcatattgccaaaatttcagataaaacggagttgagcaatatgcccgaaagagaagtggccagaaaaattcttaaacgggtgacgctggcaacgcagattgaatttccaatagaagaggttgattatatcaccctgcatctcatttcaaaaagctataataatgctcattacatttcaaatgacaattttgagcagatccgtaaagagctcgtcatggctattgagcagcttgagccctgtttgaaaaatgattttcaatttattgaaggcctgctggcacatctttcaaccatgcttattcgtttggaaggtcagattaatttagaaaatcctttaacagcagaaattcaaaagaattatcaggtgaaatatcaattagcccaaaagttaatgcacagcatgccgattttcagtcctttttctttctctgcagatgaaattgcctatattgctctgcattttatggcagctacagaaaggctcaaagaaaagaataagcataatattttggtcatttgtgctactggctatggtagtgctcaaatgctgaaaaaccgaattgaaaatgaactgggaaatctggttcatatcacggatgttattggttactatgatatcaatgatgataagctgaaagatattgatttcattatttcttctattgacctctctaatctgatatttaatattcctgttttcacagtttcggttttcttgacagaagaggaattaagtcgaattagacatggtattgcccatatagaagcttccccaacggagttagcgcctgttggagtttctcctgctgatttatcatctgattttgatcattatttttcaaaagatgcttttttgcaactgtcagatgttagtaaagaagaagtgctaaaaaagatgattcttagtatttcaaaaggggaaaagagtcattttgctgacaagatggaagaattaatttatcagcgtgagacaatgagctcggtggttttcagcgatactattgctgtaccgcatccgataaaagcagtaggcaacagacatcacatagcagtagccatgataaaagatggtctgttttggaatcaggattatcccaaaatgaaactggtctttttaacatcaatgtctatttatgacaatgatggtttacccgaattagcttcttgcattgcaactttggttgatcgaccagatattcagcaaaagatgctgacttgtcaatcatttgaacaatttaaaaagttatttttaaaactagaagaaaaggaaaaaggttgatgaatacagaagaattacaagttgccgcatttgaaattattttaaattctggcaatgcgcgctcaattgtccatgaagcatttgatgcaatgcgtgaaaaaaattacattctagctgaacagaagcttcaggaagcgaatgatgaactgctcaaagctcatcaagcacagactgatctactgcaagagtacgctagcggaacggaaattaaaattgaaatcatcatggttcatgcgcaagatcatttaatgacaaccatgacacttcgcgaagtagctattgaaatgttggaattgtataaaaaaagttgattagaaaggaatttggtaaatgtgtcatcaattaagtaaaaaaaccaaaaaagctcttgatcaagaattgaaacgaaagacgaccttaaaaaataatttattttctcgttatctgctttttagatatagtttggctctatttttctttgtcaatctttattggacatttcctctcatttataagccaagtgtctatgttattttgccagtgagtttgttaatactaattgttttagcttgtgctgaacaatttaaactatatagccttcaagaagtttatttgagaaatactgaacgggttttcaagactcaaatagttgttcaaattttattattaatcatcaacatttttcctcaacaattatcagtggctattcctttcttttcaaataatatggcagcacatgtatttcttgctgtatttcaatttttgggtttgtttatttgctggtataatcttaaacgtatcaaacaaatcaagaataatgaagacaaattttataatcgtttttacaaccatattgaaaagtatatttaatggaggacaaatttaatggatgaacaaaaaggattatttggtttcctagataaatatttgatgggaccgatgagcattattgctcaatataaagttgtacgcgctattacagcagcgggtatggctgttgttccttttaccattgttggttcaatggttttggtttttagtgttttaccgatatcgttttctttcttgcctattgtcaaagatatttttgcagcttcctttgataagtttactgccttatatatgattattaattatgcaactatgggttccttgtcgctttactttgttctaactatgggttatgagttaaccaaaatttatgcagaagaagaagaactaaatatgaatcctctaaacggagctctgctgtcattattcgcttttatcatgactgttccacaaattgtttttaataatggttccatgtcatctgtgacaactcttaaaaaaggagcagttactgtagatggctgggcaatgagtaatggtgttactcgatttggcacaacagggatttttactgctattatcatgggaatattaacagttcttctttatcgtctatgtataaaacgcaattgggtaataaaaatgccagaagcggtaccagaaggggtctctcgaggtttttcagctttaatccctagttttgtcattgcatttgttgttatatttattgatggtatctttatttttctaggaactgatatttttgaagccatctctattccatttagttttgttagaaacttaactggaacatggattggtattatgattatttatcttctaacccaagcactttggattgttgggattcatggcgctaatattatctttgcttttgttaatccaattgctcttgctaatatggcagaaaatgctaagggagctcattatattgttgcgggtgaatggtccaatatgtttgttatcgctggtggatctggtgcaactcttggactttgtatttggttagcaactcgttctaagtctgaacaattgaatgctattggtaaggcatctgttgtaccagctattttcaatattaatgaatctttaatttttggtattccaattatctataacccagcacttgctattccatttattttagcaccaatgacttctgcaaccctttattatttagcaatgaaactagatttgattaaggcagtttttgccaatgttccatggccaacaccggttggtattggtgcttttattggtacaggagattggaaatctgtcattttagctctaatttgtgctgtagctgcttttcttgtctattatccattcattagaaattatgatagaaaactagtcaaagaagaacgggaagcttcagcaattgcttaaagattgctatcttatttaatcataagaaactttcaaaggcatctcgttggatggtaaaatcccatcttgaggtgctttttttgctttaaaataagagaagataagttaatcaagctaattcaagacaaaaaaattctgaatattcttgacattgtattgaaataggagtaaaatacggcaagttggcattaagtcaacctaaaagctagctgactttctcttaggataagaaggtcagtcattggaaaatagaaaaggggaaaaaatgaaaaagaaatttatttatcttactgtccttgtggttgtagcggtattttgcataagcacattcttgacattaaaaggagattcgcaggatcgcgaagcacattggagttattcaggcagcacatcacctgaacattggggagatttatcagatgattataaggctgctaaagatggtaaggaacagtcaccaatcaatatcactggtgccaaagatgttgacctaccttccctacaattaaacagtaaaaattccaaggctgaagtagaaaataatggtcataccatcgaagttaagttaaaaaataagaaaaatacgctgaaatttaatgggaagacttatacacttgaacaattccattttcatgcgccaagtgaaaatcaaattgacgggaaaacctaccctttggaaggtcattttgtttacacaacaaaagataagaaaatcactgtcgtatctattctctatcagtatggaaaagaaaataaaaccttaaagcaagtttggaagaaaatgcctcaaaaagcagagacaaaaaagaacctatctcaacctgttgctatcagtcaattattccctaaagatttggattactataattttgagggttctttgacgacacccccttgtacagaaggggttaattggattgtctttaaaaagcaagaaaatatcagcaaggctcaagtgaaaaaattctcgaaaacgcttggattcaacaacaatcgacctattcaaaaattaaatgggcgtgagattaaagagtagtcttttcaaccattggggacaatgaggaagtctttgtctaatttctttgttttgtcagtatctcatcttgtactacttctaaaagaatgtgctataataagcttatattaaaagaggagaagccttttgaagactattgtgatgatgtatgtgactgtcatgcctgtttttttggctggggttgccaatcgttttttctgcaaatctgatattttagcttggacttatcagcctattgatggtggttttacaatgtctgatgggaagcgtattttgggagccaataaaacttggaagggtttttggggcatgattgccttgacgactttttgtcaggttatttggggattcatcttaggaatcattccgcatttgctcactttttcattagtgaaaagttatcacaatgatatttttttcaatctgtttataggatttctaatgggaagtgcttatgttttatgtgaattacccaatagtttcattaaacgacgctttaacgtttcgccaggacaattagcgagtggaaatgctaggtgggtctttttgtttgcagatcagattgtccctttcttaggaagtattgctgttgtcgcaatctttagtcccatgacgttttcttattatgttggctatgttcttttagctgctataactctttttgcgattaacagtctgattctatttgttgaaatgaaaagaaaataatggcactcatttccatttaatttaattatttaaaaaaagcctatcctctcggtgctaaataaagcactaagaggataggctttttttatcattttctttttcttttgagcataacttagaaataaagtagttcttttggcgtttgggtaaagacttcaaaaccatttttggtgacatgaccgcaatcttcaatacgaacaccaactttttcaggaatgtaaatgccgggctcaacagagaaacacatgccttcttctaggagcatatcatttcccgccataatagatgggaattcatgcagtcccataccgatgccgtgcccgagacgatggttgaaatagtcaccatagccagccttttcgataacagaacgagctgcggcatccacttgagcagcactcactcccggtttgatgaagtcaagtgctgttaattgggcttctaagcaaatattataaatatcctttttaaactggtcaggttggccaacagcaacagttcgtgtcatatcactgacatagcctgtactttcaacacctaaatcaaagagcagcaaatgattgttttcgattttgtgacttgctggaaggccgtgaggattggcagcgttactgcctgttaataccatcgtttcaaaactcattttatcaacgcctagttttttcatttcaaattcaatctgagcgataatatctgtttctgtggcattaagggaaatactatcaaaaccaatttgaacagccttgtctgcaagctctccagcgattaataatttttgaatttcgtcagctgatttaatcaggcgcatacgattgattaaaggagttaagttggtgaattgacctgaaaaaattgtttcaagtcccttaaatttcgttacatttaagttgtcaaattccaaggcaattttagaataattcgttttaggcaataaggtcttaattttttcccaaggattttcaaaatcaagatagccagtcaccgaaatatctaatatactttttgctctcaaagcatcaagttcaggtaaaaaaagcagaggttcttgatctgcaaagaggaagaggaacataaggcgttcatgcggatcactataaaaacctgttaaataattaatggagacaggatctgaaaggacagcagcttcaataccttgctttttgagtttttgaacaatctgtgctaattttgacatattaaaaccttctttcctttctatttttccaaaaaaaatcaaaaaaatcaagctaattctaagtttttcataaaacttgcactcttttacttgaaagtgttttcaaatagtgttagaataccaatggaagcgtaattttcaaaacagaaaggatgatacaagatgaacacagatgacacaatcactatttatgatgttgcccgtgaagcgggagtgtccatggcaactgtcagccgtgttgtgaatggaaataaaaatgtcaaagagaatacccgcaaaaaagtcctagaagtcattgaccgtcttgattatcggccaaatgctgtggcgcgtggtttggcaagtaagaaaacgactacggtaggtgtggttatccctaatattgctaatgcttatttttctattttagctaagggaattgatgacattgcaaccatgtataaatataatattgtactggcttcaagtgatgaagatgacgataaggaagtcaatgttatcaatactttatttgctaaacaggttgatggtattatttttatgggacatcatttaactgaaaaaattcgcgctgaattttcacgagcacggacaccggttgttttatcaggtactgtagatctggagcatcaactccccagtgttaatattgatcatagtaaggcagcacaagatgccgtagctttattggccaaacatcatgataagattgcttttgtatcgggtccctttattgatgatatcaatggcaaggtacgtctggctggttataaagaaggcctgaaaaagaaaggattgcctttcaaagaaggacttgtttttgaagctcaatataagtatcaagaaggatatcagttagcgcagcgtgtcattaattcaggcgcaacagctgcttatgttgctgaggatgagttggctgctgggctgttaaatggtttgtttgctgctggtaagaaagtcccagaagactttgaaattatcacgagtaatgactctactattgcgctttatactcgtcctaatatgacatctatcagtcagccgatttatgatttaggagcagttgctatgcgcatgttaacaaagattatgaacaaggaagaattggaagaaaaagaaattgttcttaatcatggtatcagagaaagaggaacaactaaataggacagaagtttctttaaaaccattttactgatgagctaatccagtgagatggtcatgttataaattatcagatatagtctgttttacagcacagtcaaggagtctagaagtttatattctggactcttttcataaaagggagcaatcatgacaaatgaaacaatgatgcagtattttgaatggtacttgccaaacgatggtaagcattggcagcatttagctgaagatgccagtcatcttaagaatattgggattagcaaagtttggatgccaccggcttttaaaggaacgggttccaatgatgttggctatggcgtttatgatctttatgatctgggtgaatttaatcaaaatggaactgtcaggaccaagtatggcagcagggaagattatctcaatgctgtgaatgctctgaaggagcaggaaatcatgcctatttccgatattgtccttaatcacaaggccaatggtgatgccaaagaaagatttcaagtggttaaagtcaatcccagcaaccgtcaagaaaagatttctgaaccttatgagattgaaggttggacccagtttaactttccgggccgacaggataactacagcgatttcaaatggcattggtaccatttcactggcgttgattatgacgctcttcataatgaaaatggtatctacatgatcctaggtgataacaagggttgggccagtcaggaaaatattgatcaggaaaatggtaattatgattacctgatgtatgatgatattgattttaaacatcctgaagtacaggagcacttgcgagattgggttgcttggtttttggaaacaagtggtgtcggtggttttcgtttagatgctattaaacatattgataagacttttatggcacaatttattcgttatattcgtgagcatcttaaagcagacctttatgtttttggtgagtactggaaagacagtcatttcgatattaccgattatcttcatagtgttgacctgcaatttgacctgattgatgttatgctgcatatgagtctctttgaggctggtcaaaaaggttctgattttgatttgtcaacgattttagacgatagtctgatgaaaagccatcctgattttgctgttacttttgttgataatcatgattcccaaaaagggcaggctttagagtcaacggttgcagagtggtttaaacctttagcttatggtttgattttgttgcgtcaagaggggattccttgtgtcttttacggtgattactatggtatttcgggtgaatttgctcaggaatctttccagactgttttagataaactgctttatatcaggcaataccatgtttatggatcgcaagaagattattttgaccatgccaattgtattggctggacttgtctgggagatgaagagcaccctgatggtgtagctgttatcatgtctaatggggaagccaattgcaaacgtatgaatatgggagaatttaatcggaataaggtttttgttgattatcttaataattgtacagaagaagtgattttagatgatcaaggctggggtgattttccagttcaagaagcttccttgtcagcttgggttaataaagatgctcattgataggaaacttgctcaggagatttaggatgacttatggcatgtttgagtctattctgctcttgacagtactaggtggcatctcaaatgatttagtgatataattaaaagcatgaaagttttattgtatttggaggcggagcattacttgagaaaatcaggtattggtcgtgccatcaaacatcaagaacgcgccttgactttggcaggaattgattacacaaccaatcctgaagatgattacgatttggttcatattaatacttatggtctgaaaagctggcgcttaatgaaacgtgctaaaaaggctgggaaaaaagttattatgcacggtcattcaaccgaagaagattttaggaattcttttgttggttctaattggattgctccattttttaaaaaatacctttgccgcttttataaagaagctgatgctattattacaccaacaccttattcaaaacggctcattgcaggatatgggattaccaaccctatctatgttgtctcaaatggtattgatttagcgcgctatgttcctgatcaggctaaggaagccgcttttcatcagcattttcagttaactggtgacgagcaggttgttgtatgtgcgggtctttactttaaacgcaagggaattgaagattttattaaagtagcccaaagaatgcctcatgtgcgttttatttggtttggcgaaacgaataaatgggttattccccatgacgtcagagctattgttgctaagaaacatcctgataatgttacttttgcaggttatataaaaggcgatgttttcgaaggagcaatgagcggtgctgatgctttcttctttccaagtcttgaagaaactgaaggtattgttgttttagaagccttagctagtcatcagcatgttattttaagagacattcctgtttataaaggctggataactgatgaagcagttgagtttgcaacaacggttgaaggatttgaagaagctattcaaaaggttcttgatggtcacagtcaaaagacagagacaggttatttagtcgcccaaagtcgtaatattgataaggtggctcatgacttggctcaagtctaccaaaaagttatggaggggtaggatgcgtgtaggtctttttacagacacctatttaccacagatttcaggtgttgcaacgagtatcaaaaccctaaaggaagaattagaaaaacaaggacacgaggtttatatctttacaacgactgataaacatgttaaacgttatgaagatccaaccattattcgcttacccagtgttccttttatttcttttaccgatcgtcgaattgtttatcggggactctttgaatcttataaaattgctaaaacttataaattagatatcattcatacgcagacagaatttagtctgggaatattgggcaaaatggttggcaaggccttacggatccctgttattcatacttaccatacccagtatgaagattatgttcgctatattgctaatggcaagcttatccgtccaagtatggtaaaatatattgttcgtggttttctcaatgatttagatggggttatttgtcccagccgtattgccttaaatttattagatggttattctgtcaagattcccaagcgaattattccaacaggcattgacttgagagaatacgagcgaccagacattagtcaagaagatattgccaaacttagagaaaaatgggctattgctagtgatgaaactgtcttattgagtctgtcaagggtttcatatgaaaaaaatattcaagctctgcttgctaatatgccaaaaatcttatctaacaatcctaaagtgaagttgcttattgtcggagatggcccctatcttgaagagttgaaagaacaggctcaagatttagccgtcatggacaatgttatttttacaggaatggtgagtcataatgaaacagctctttattacaaggcagctgacttctttatcagtgcgtcaactagtgagacgcaagggctgacctatgcagaaagcttagctagtggtaagccgattatcgctcagtccaatccttatttagatgatcttatcacagataagatgtttggaacgctttatcaaacagagtcagatttagccgatgctgttttaaatgctatcgtttcaactccagttaagcaggaaaaggtctggcagaaaaaactatatgaaatttcagcagaagcctttggcaaatcagtttttgcattctatttggatatgattatttccaaaaaggctaagaaaaaggaaaaatggtccttggcagtcgaaggaaatcgaacagatacttcaattagaattgtcaaatcaaccattaaactgcctgcaacagctcttaaaaagaccgctaaaacttccgttaaagtgattaaagcgcctgtgcgtatggttaatgctattagagattttcttgattaacagacttgaaaaattcccaaatcctgctataataatttttggagacaagttaggtgtgttcggtcttaaagagagcacttggcagctgagaaagtgcaggcctatcatttaatactactccctaattttttatgtaaacataaaacggtggctacgttagagccgattcgaggtgtgagtcttttgacttgcataaatgaaggtggaaccacgttgcgacgtcctttttggatgtcgtttttcttttgtcagaaagagggagaatggtgatttatatgattggcggatcgccttgtagtgggaagtcaacaattgcttcacttcttgctagacagtatcagctgcttcatatcaagctggatgatttggtagacgagatgatgagtcaagcaagtgcagactcacagccgatttgccttcttagacaggacagaaatccggaacaaatctggatgagaaatccagaagagatggcagatgaagaatggcgcttttatgaagagatttttccttatataaaatcttacttgataaaaaatcaagatagaccactcttggttgagggggcaggacttttgcctcacttggtaaaggagcttgaatggccagcgtcttcctatctatgcttgactccgacagctgattttcagaaaaagcattataggcagagagaatgggtttcttatgtcttagagggaacaaccaatcctgagcaagcttttgaaaactggatgcagcgagacattctttttgcccaaatggttcgtaaggaagcgatgagattaggctattctagcctcatgacagatggtagtcaatcagaaacgcagactgcggaagagattgctcggctcttaaaattgtccaatataaatgaaatagatattaaaggagaaaacacatgattaagattactttcccagatggcgctgtgcgcgaatttgaagctggtgcaacaacgtttgaaattgctgagtctatcagcaagtctcttgcaaagaaagctttggctggtaaatttaacggtcagcttattgatacaacacgcgctatcacgcaagatggcagcattgaaattgtgacacctgaccacgaagatgctttagacatcttgcgccactcggcagctcacttgtttgcgcaagcagcttgccgtcttttcccagatattcacttgggtgtcggtccagctattcaagatggtttctactacgatacggacaatgaagcagggcaaatttccaacgaagatcttcctcgtattgaagaggaaatgaagaaaatcgtcaaagaaaacttcccatcagtccgtgaagaagtcactaaggatgaggcacgcgaaattttcaaaaatgacccttacaaactcgaattgatcgaagaacactcagaagatgcaggtggtttaacaatttaccgtcaaggcgaatacgttgacctctgtcgcggaccgcacgtgccgtcaaccggccgtatccaagtctttcatctacttaacgtggctggtgcttactggcgcggtgacagtaacaatgctatgatgcagcgtatttatggtaccgcttggtttgataagaaagatctcaaaacttacctcaaacgccttgaagaagctaaagaacgcgatcatcgtaaattaggtaaagaattagatcttttcatgatttctcaagaagttggtcaaggtttgccgttctggctaccagatggtgcaacaatccgtcgcatcattgagcgttacatcactgataaggaagtcgcttcgggctatcaacatgtctacacaccaccaattgcctctgttgacctttacaagacctcaggtcactgggaacattaccgtgaagatatgtttccaactatggacatgggagatggtgaatcctttgttttgcgtccgatgaactgtcctcatcacattgaagtttataagaatcatgtgcattcttatcgtgaattgccaattcgtattgcggaacttgggatgatgcaccgttatgaaaaatcaggtgctttatcgggacttcagcgtgtgcgtgaaatgacactaaatgatggtcacacttttgttgctcttgatcaagtggaagatgagtttaagcgtaccctccaattaattattgatgtctatgaagacttcaatttaacagattatagtttccgtttatcttatcgtgaccctaatgatacccataaatatttcgatgacgatgaaatgtgggaaaaatcgcagaccatgctgaaagctgctatggatgatatgggcttagattattacgaagcagaaggcgaagcagctttttacggaccaaaattggatatccaagtcaagactgctcttggcaatgatgaaactttgtcaacgattcaattggacttcttgctgccagagcgctttgaattaacctatattggtgctgatggcgaagaacatcgaccagtcatgattcaccgcggtatcgtttcaaccatggaacgcttcacagcttaccttattgaaacctataaaggagcttttccaacttggttagctccgcatcaagtaactgtcattccaatctcaaacgaagctcacattgactatgcttgggaagttgctaaagaactgcgtgaccatggtattcgcgctgacgtagatgaccgtaatgaaaaaatgcagtataagattcgtcaaagtcagactaagaaagtaccttaccaactcattgttggtgataaagaagtggaaagcggtaccgttaatgtccgacgttatggcagcaagcaaacgcatacggaaagtatcgcagagtttagagagaacattttagctgatatcaagcgtaaatcacgcccagacaacgctaaataagatggtctaagttgtgacggaattttctgaatttcgaataagttctttagctaagttccataggagggaggaacttggtgtgctgcgcatatggattagggagttgcaaagaagtcaggaagttgaaatcggctgatgctaaataagagagactgaagttccattgggctttcagtcttttttgtctagtaatttgatatattgatgttttttggtgaaatcagaacaatccgcttgtctacaataaaataacagtcaggtttcaagtgattatgatacaataaatgaagaactggaggtcttatgaacaatttaacagaacaagcttttgctagagctttgaaagaaatcatggcaaaaaaatcttttgataaggtgaccgtaaccgagctcgttcgatttttaaatgttaaccgacaaactttctattatcactttaaagatttatatgatttattagaatggatctatatcacagatggcgaaaaaatgattggtgataaacgaacgactgtttcttggcaggagggtctattagcaatatttcagtatattcaagataacgaagcctttgtccgtaacacttatcattccattaatcgcaattatttggaacattttttatatgatagagcctacagccttattagaccagttattgaagaaaatgaagttcaaacgcagcttagtgaagccgatattgatttgcgcgcacatttttataaatacggtctggttggttttatcttagattggatcgattcaggactgcgtgaaaagccagaagatttaacacagcgtatttatcatttactggaaagtttatagttagacaattaaaaagttctgtcagatttttaggcagcccttttttattgtctatttttttggatctgcaaaaggtgttaaataagattataaaataatagatgaggagttaacaagtatgtattattcaaatggtaactatgaagcctttgctcatccacaaaaacctgaaaatgttgatgggaaatcagcttatattgttggaagcggcttagcggctctttctacagcagtttttcttattcgtgacggacaaatggctggagaacgcattcatattcttgaagaattatctcttcctggtggcagtatggatggtattcgtaatgaacgtttaggttacatcattcgcggtggtcgggaaatggagcctcactttgaagtcttatgggatttatttcgctctatcccttctctggaaaatcccaaacactctattttagatgaattctactggcttaataaaaaggatccaagttttgctaaaacacgtgccatctatgagcgtggaaaggcaataccagatgacggtcagttgaccttatctcaaaaagcagttaaggaaatttttgatcttgttctaacaccggaaagtcatctgcaggatgttcagattgatcaagtctttagtgaagatttcttcaactctaacttctggctttattggagtaccatgtttgcttttgaaccatgggccagtgctatggaaatgcgccgttacctcatgcgattcattcagcatgttgggactttgaaaaatctctcatccttaaaattcacacaatacaatcaatatgaatcattgatcttaccactagtagcttttctcaaagaccataatgtcaattttagctatcagactgttgtcactaatattttagtcaatcgttctggcagtgataagcttgctactaaaattgaaatgactgttaatggtcaagaaaaaagtattgctttaagtagagatgatcttgtttttgtcaccaatggctccattacagaaagtagtacttacggtaacaataatcatccagctccattaacgcacgatcttggtgccagttggcagctgtggaagaatttagctgcacaagatagtgattttggatgtcccgaaaaattctgtgaaaatatccctgatgctaattggaccatgtctgctacaataacttttacagatcaacgcattgctaaatacattgaacagattaaccaaaaggatccttatagtggctctattgtaaccagcggacctaccagcattaaagattctagttggttgcttggctattctatcagtcgacaaccacattttaaagaacaaaagaaaaatgagcttgttatctggctctatgctctctatactgatcgcaaaggagattatgtcgctaaacggcctgatgaatgtacagggattgaaatgtgtgaagaatggctttatcatataggagttcctgaaaatactattcatgaactagcctgttcggcctcgacgatcccttgccatatgccttatataacaacgtatttcatgccgcgaacaactaacgatcgcccacttgttgtgccaaaacatagtaagaatttagcttttataggaaactatgctgaaacaccgcgagatacggtttttacaacagaatattctgtcagaactgctatggaagctgtttacactttacttgaagttgatcgtggtgtccctgaagtgtttgcttcaacttttgatattcgcatgctacttaatgcgctttactatctcaatggtcaaaaatctttaatagaaattgattttccttgggtggaaaaagcagcccttaaagaagctctcaaaaaggttaaaggaacatacatagaagaattattgaaagattatcatctgatttagaaaattttctatctgaagattctaaaggcagacatctatgattactgcgcaatcgctcataagggttaaaaaagcagcagttctcattagaagataagttcaatgaagactttctagctacagctttttaaaaatgaatttgtttgcaagatgatgtttttttgactgagattgtatctattaatgaacaagtagtcatattatcaacgttcaatcttttatcaaaattatcaagtaatgctgttaaaaacataatgaagtcattaaagactttttaatagtcgctcctaatgctgttttttgttataatagtcttatgaaaaatcaagaaaaaatttcggcttatcaaattttactggctcaggcacaatcgatgtttgccaatgaaacaaatgctttggccaatttagccaatgctacagccatgctgaataagactcttcctaatgccatctttacaggattttatctttttgacggtgaagaacttgtcttaggtcctttccaaggtggtgtctcttgtgtacgtattgctcttggaaagggtgtctgtggtcaggctgctgccaaaaaacaaacacttatcgtaggagatgtcaccaagcatgataattatatttcctgcgattcagccgctatgagtgaaattgttattcctatggtaaaagacggtcagcttattggtgtgctggatttagattcacacttagtcggtgattatgatgttatcgatcaaggctatttagaacaatttgtgacaattcttctggaaaaaacaaattggcattttgacatgtttggagtgaaagactgatgtaccaagcgctttatcgaaaatatcgaagtcagacttttgatgaaatggtagggcaggaagttgtggcaaagaccttaaaacaggctgttgcttcaaagaagattagtcatgcctatcttttttctggaccaaggggaacaggaaaaaccagtgctgctaagattttcgccaaagccatgaactgtcctcatcaagcagacggggaaccttgcaataactgtgatatttgccatgatattaccaacggaagtctggaagatgtgatagaaattgatgctgcttctaacaatggtgttgatgagatccgtgaaattcgtgataagtcaacctatgctcctagccgtgccacttacaaggtttatatcattgacgaagtacacatgctctcaacaggggctttcaatgcccttttgaaaactttggaagaaccaacagaaaatgttgtctttattttggcaacaactgaattacataaaattccagctactatcctttcacgtgttcaacgttttgagttcaaagctatcaaaaccaaggccataaaagagcatttggcggacattctcaaaaaagaaggcctcagctttgatgaagaagctttaagtttgattgccagacgtgctgaagggggtatgcgtgatgccctgtccattttggatcaggctcttagcttaacgaatgataatgatgtttcgctagaaatagctgaagaaatcactggcagtatcagcttaagagcactagatcagtatgtggctgaccttttggcacatgaaactcagcaggcactcagtgatttagatactatttttaacaatggcaagagtatgagccgttttgcgacagatcttttaaattatctgcgtgaccttctggttgtccaagcgggcggagaaaacacgcatcatggagaagcatttgacaaaaatcttaccttatcacaagagactatttttcaaatgattgacgttgtgaccaaaagtctaccggaaatcaaaaacggaacacatcccaagatttatgcggaaatgatgaccattcgcctatctgaaaataaccagaaagttcattcagttcaagatttaccggataatgttgctcaagaaattgaagcgctcaaatcggagattaaagaactcaaaaaaagcttgcaatctctggaaaaaggcaagcctttcaaagtgaccaaggttcaaaagacttccttccgctataaagtggataagaacaaggtcatgaccattatgcgagaaaccgtggcagatagtcaaaaatcgcgtgagtatttagaagccctcaaaggttcttggaatgaaattttagacagcatttcacctcaagaccgagcccttttaatggggtctgagcctgttcttgctaacagcgaaaatgctatcttggcctttgatgctgcctttaatgccgaacaagctatgaaacgctcagatctcaatgctatgtttggcaatatcatgagtcaggcttctggcttttccccaaaaattatggctgtgccaagagctgagtttgatgccatccgtagcgaatttgctcatagcctaaaggcagacaaagatgattctcaagaagaaacaacagaagcaacaaaagagtttatccccgaaggctttgacttcttagcggataaaattgtccttgaagaagagtcataatcaaaaaaagaaaattccgatagggattttcttttagattatgtgactttttaaaagaaaattttaacatgaattttctttttttggtacaataataatatgttaaaacaagacttcattatcatgctgataacgactgtgactgaaaccattttttttaataatgcgatttttgaaggtcaattcttttgggctggtttttgggggattttgctctttcgcagtctgcataagacttatgttatcagcaagtttaccaaagccatcttgtcggctaccaagaagaaagactaatttcgccactgttaaggattttttcctgcccattttctaattgcacgatgagctgtcccgtatctgtaatatctgtcgcaatacccttataagtcacatcattttccacaaaggtcacttgtctatctaggacgagtgatttttctttgtagacttttatcagttcggacttaggaatattaaagaaaatattccaaatttcagagatgagctgattccgcgtgatagtaggcttttcagaaaaaatgctgcttgccttgctctgcaattcctcaggaaaatcagtaacatgaaaattaatgcccataccaatgataacatcggtaatcaagcctgtctcgatagaagaaacagcctcggtcaaaataccagccacctttttaccatgcaaataaatatcattgacccacttgatgtctgtttcaatcccagtcaagcgagaaatggccttaactacactggtagcagccatcaaagtataagaaggtaactgcttaaaaggcaattcagggtgaagatgtatagacatataaatgcctccagtttcaggagtaaaaaactgccgactaaaacgccccttagcagctgtctgactaggcgcaagataaagagcaggagcagggtcccctttttcaatacctgccttagcatccagctgtgtcgaagaactcttctcattgaaaaagaccttgatcccagtcatctgttcaatctcatccggtaaaaaaagatcgcccgaaagcaagcgatatccacgatttttaaccgattcaatgacaagccctttactttctaaagtctgaatcgccttccaaacagctgtccgagaaatgcccaaatccttacccagaacctcacctgtcacaaaatcatccgcctgcgaaagcacctgataaattttctcatatgttttcataatccaacctcaaccacaaatgaatttcttactgttattgtagcataaaaaagcaagaaaaaaatggaaagagaaacgcaataagacaaatgagaagttttagtgaagaaagtatcaaggacgatggaagaagtagggggtaaaaattttagaaaagatggaattatcaaatgaatacttaatataagaatattatgataatgatattgctaagttataccaatcttatttacatatttttgtcccaatatattgatttttgtctcgtgtatgttataataaattaggaggtatctagacatgaaaaaaagacaagtactcaacttaattaaatactttactgaaggaaatgaaacaggtttcagaactgaagcttatgagattgctaaatcctttgataaaagtggagattatcaattggctgagtatattatggctttattatctgatgctaatacgtttgttccgcaggttaatgaggatagttatgattcattaagaaaggtatcattattaaatccagattccctccctttacctgattctatttccaaagacattattggaattgtaaatgctgtacgtcggaatattggggtgaataaatttttatttgaaggagcaccaggaactggtaaaactgagacaacaaaacaaatagcacgtctattagaacgagaattatatgttgttgattttgaaactatcattgatagtaaacttggacaaacttcaaaaaatgttgctaatctctttaaagaaatcaatagtttttctcagcctgacaaagtagttgtgttatttgatgaaattgatgcaattgccttaaacagattagatgctaatgatttaagagaaatggggcgcgccacttcgtctattctgaaaggaatggattcgttgcgtgaagaaattgttttaatagctacgacaaacttgtttgatgtatttgataaggctttaattcgtagatttgatgcagtgattaattttaatagatatagccaagatgatttattagaagttgcagaaataatgttaaataatgttttagataatttcaaacattctgggaaaaatactagattatttaaaaagattatttcgttaatgaaaccaataccatatcctggggaactaaaaaatattctaaaaagttctgttgcttttagtagtttgactgataaatttgattatttgaaaaggttgttttcaactgtctataaaccaattgatgaagttagcttggttgaattaaaggaattggggcttactttaagagaaattgaaattcttacaggggtttcaaaaagtcaaatttcaagggagttaaaaggagaatagtttatgaatgaattattacaattaaaaggaagatttgaacaacaatcaagtaatggaagaccgggagctccctctcttttagccgataagaaagtgactagtagtcagttgttacggctaaaaaaagaacttgaaattctaaaagaatattggataaaaatagattattttgaaggtgctttaattactacagtatatatagacgttgtagctaaaagtagacggataaaagaattatttaaaaaaagtaacaaaaggcttgcaaatgattttgtagttggtgcaaaatttttaaatgaagaaaagcacgaagaaagacatgctattacctattatatagatatgcaagttctagacaacgcaatacagttacttgaaaaatctcaaataatattagatagtgattttggtggaaaaattaccactaaaattgtaaatgaaattaactcgaaaaaaagaatatatgataacgaattactatctaaaacaacttttttgcaaacaattgtagatgttagttctattgatagatttgatatccctcaaaatgagtttgattcttataatacttctattattagtatatttgaaacagagttgaagacaactgatttattaaaaaaaattggactagatattcctgtctctcgaattattgataatgcaacaattcttctaaatccagatgaattatctttactaaatgaaaaagctccttatctgattgctatggcaacagttgatatttcgaaattagatagttattatttagagcgtttagatagtagcggtgtaatgagtattccattaccttcgaatgaaccagttgtgggagtaatagatacattatttgatgaaagtgtctatttttctaaatgggttacctttgaaaataaaatctcttcagatattcagatagtttcatcagattatatacacggtacagcagtaacttcaattattgttgatggatcaactattaatcccgaattagatgataattgtggacggtttagagtaaaacattttggagttgctatcggcgggagatttagttcatttacaattttaaaatccataagagaaattgttgcagaaaacagggacataaaggtttggaatctttctttaggttctgccttagaaattaataaaaatttcatttctccagaagcggcttttttagataagttacaatatgaatatgatgttctttttataatagctggaacaaataaaaaatctaatgaaaagcagagtatacggataggagcgccagcagattctatcaattcactagttgtcaatgcagttaataaaaaaggacaaccaacttcttactcaagaaaaggtaaagttttatctttttttaaaaaacctgatatctgttattttggaggagatggtagagaaagaattcgagtgtgcactcccacaggtgaaagttttgtaactggaacgtcgtttgctgctccatggattacaaggaaagtagcatatcttattcataaaattggattaagtagagaagttgcaaaagcattaattattgattcagcaatatcatgggaaaaaactcaggaagatgcaaatttgattggatatggagtggttccgcagaagatagaagatgttatcaatacaccggatgacgaaattaagtttgttctttctggaaaatcgttaaaatatgatacttataattataatctcccaattccagtcgttgatgaaaagcatccttacatagctaaagcgacattatgctactttcctaaatgttctcgtaatcaaggtgttgattacacaaatacagaattggatatctattttggacgtatcaacggtcagaaaatagtaactattaatgataataaacaaagtgataatgttgctatgcctgaaaaagatggaagaggaatgtatagaaaatgggataatatcaaatctattgttgaattttttaaaccaacaaaaagagcgaaaaaagcctatgaaaatggtttatggggcttcagtattaagacaaaagagagactcaatgctaatgatggtgaacatttaaaatttggtatagttgttaccttaaaagaaattaaaggtgttaatagaatatctgactttatcaatcaatgttctatgcgtggttggcttgtcaatagggttaatgttgaagaaatgattgacatttacaatgttgccgaagaagaaattagttttgatgaatagtctatttctataaatataaggtacaattaataactaactcttaaaggaaggatagctcaaatatgactaatacagaatttcaacgtgaagtcaaagaagataagccagttattgcgctttgttatgattttgataaaaccttatctcctgatgatatgcaggcacagggttatattcaaaaagttcaaaagagcagcgataatgaagttgcagaattttggaaagaatctaatggtcgtgctgagaaaaatgatatggataaaaatcttgcttacatgtacaccatgaaaaagaaagctagaggccaatttccttttactaagaaaacgctagctgagtatggcccaaaagttgcactttttccaggcgttaaagattggtttgagagaattcaaaaatatggtgcagaaaaagggattattattgagcattatattatttcatctggattgaaagagatgattgaagggacatcaatcgcaaaagacttcaaggaaatatatgcaacatccttttactttgatgatgatggtgtagcagtgtggcctgcccaagtagttaactatacaaataagactcaattctttttcgtatttcaaagggtgtactagatgtcaacgatgaagctgtcaatgacttttttactccagataagattagagtcccttttcataatatgatttatattggtgatagtgatactgatattccttgtatgaaattagtaaattctcatggtgggtattctattggtgttttcaatcctgaagaaggaaatgaggaaaaagttaagaagagggtttataaaatgatacgagataatcgtatcggttattttactccagctgattattcggaaggtcaagaattagatcaacttattaagttgattattgacagaacagtatttaatgagcaattggaaagaaagcattatgagtacaaaaacgaggcactgaaacaatctagacaaaagagtgaggaagagcaagagaaaatcgatttgattgatgctctagaaagtagtggtaattttaaaaatacccataatatcatcagaaaactgtcaaaatacgagaattggcaggatgatgaaatcatagatttgctctctataggttttcataacagtcaagtacgttatattttaggtgatcaagatattaaagtattttacaaaaaaattttagaaaaagctccttcgattgatgaaaatgcagcgaaagtagcagctattattgaagcatcagaagaggaataataattattcagttcttttctctttccgatcaccctattcatcaagtcagatacttaaaaatagcaagcaatcatttttctaaaaaattttcccttcttaagtttcttttaagaatcctatcttatactatagtcatcctagcaataggaatcctaaaacttttctttttcataaatctcctaagaatctcagtccattcggactgggattttttttgcgggtagacttgctgccaaaacttctattaaaaatagttataaccagctggttggaaaaaatatagtgatttatggttgatggtaattaagctataaaatagcaggatactagcagtattagctctagaaaattgagttgagccacttaaaaaaataaatttaatgactctatttaataaaaacgtggtacaatggtagagttaatgagtcccgaaaaggcggcttttgtgtttaaaatacttttattctttcttggcttgttgtggtaaccttaaatgctaactgtaacatggctgctagactaaaaatatttgattaacacaaggggcatcttcttaaatgtggattgctcggaaaggtttcaactttcagtcggttctttgtaactcgctctaaatgactgcatctaaagttgctagtcatttgacggtagccgctattgtcggtctgcctcagcgccttactagtttaacacttgaaagggaaagatttcttgtgtttagcaggttagtaggtcgcaaatttctcttttttagagaaacatctatttttaaggggggacattttatgtcagaacgtaaactttttacatctgaatcggtatcagaaggacatcctgataagattgccgatcagatttcagatgctattttagatgctgttttggtacaggatccagacgcccatgtagctgctgagacagctgtttatacaggttcagttcatgtttttggagaaatctctacgacagcctatgtggatattaatcgtgtggtgcgtgataccattgctgagatcggctatacggatactgcttatggcttttcggcagaaacagttggagtgcatccgtcattggtggagcaatcgcctgatattgctcaaggtgttaatgaagctcttgaggttcgtggccatcatgagcaagatgatctggatttgatcggtgcaggagatcaaggtctcatgtttggctttgccgttgatgagacgcctgaactgatgcctttgccgatttctttagcccatcgtttggttagaaaattggcagagctgagaaagtcgggagaaattgcctatcttcgtcctgatgctaagagtcaggtaacagttgagtatgatgaaaatgataagcccattcgtgtggatacggttgttatttcaacacagcatgatcccgaagcaacgaatgagcaaattcatcgggatgtgattgaaaaagtcattaaagctgttattccagctgagtatcttgatgctaagaccaagtatctcatcaatccgacaggccgttttgttatcggcggtcctcagggagattctggcttaacaggccgtaagattattgtcgatacttatggtggttatgcccgccatggcggcggtgctttttctggtaaggatgcaactaaggttgaccgttcagcttcttatgcggcgcgttatattgctaaaaacattgtagctgcaggtttggctaagaaagcagaagtgcaattagcttatgctattggggttgctcagcctgtttctgttcgtgtggatacctttggaacagcgcttgttgcagaaagtaaactggaacaagcagtacgtcagatttttgatttgtgtccagcaggtattattaagatgcttgatctgaaacgtcctatctatcgtcaaacagcagcttacggccatgttgggcgtacggatatcgacttaccttgggaaaaattagataaagttgaggagctgaaaaaggctgtccaagcataaaaggcggattttccgctttttttgtgtttataaatttcattattttataatgattcagttagtttgaaatgttgtgtaatatatgataaaataacttggttaagattctatcgtttaagaaaagttaagaaagttttgtttgcatgagaaaaattgtcattaatggtggtaagcccttaaagggggaggttgcggtctcaggagctaaaaacagcgttgtcgctctgattccagctattattttagcagatgatattgtcacacttgatggtgtgccagctatcagtgatgttgatagtttaattgacattatgactttaatgggagcaagtgttgagtgtgatggtgacagtcttaaaattgatccacgcggtgtaaaggatattcccatgccttatggcaagattaatagtttaagagcttcatattatttttacagtagtttgctgggacgttttggtcaggcggtcgttggtttgcccggtggctgcgatttgggacctcgtccgattgatttgcatctcaaggcctttaaagcaatgggagcaacggtttcctatgagggagaggctatgcgcctttcaaccgaaggcaagccgcttaagggggctcatatttatatggatactgtcagtgttggagcaacgattaatacgatgatagctgctagtaaggcacaaggccgtaccgttattgagaatgctgcgcgtgagccagaaattattgatattgcaacgcttttaaataatatgggagcccatatccgcggggcaggaacggatatgattatcatagaaggtgttgaaaaacttcatggaacgcgtcatcaagtcattcctgaccgcattgaagctggttcttacattgctttggcagctgctgttggtgaaggaatcaaggttaccaatgtgctttatgaacatttggagagtttcatttcaaagctggaagaaatgggcgtgcgtatgactattgaagaagacagtgtttttgttgaaaagcaggacaaattaaaggcagtttccattaagacttcgccttatcccggttttgcgactgatctgcagcagcccataacaccgctattattaacagctgtaggccgcggaaagattcgtgatactatttatgaaaaacgggttaatcatgtggctgaattggcacgtatgggagctaagatttctgtcttaggcggtcaaattatctatgaaggacccaatgaattaagtggagctcctgttaaagcaaccgatttacgtgcgggagcagcacttgttacggcaggattaatggcaaaaggtcaaacggttattacgaatattgaatttatcttgcgcggttattctgacattattcaaaaattgaatcgtctaggtgcggatatcgaaattgttgaagaataagatcaacggagtcgattacaactataaaacagcctatcaagctgaatgtttttaatcagcttgataggctgtttttttagtccgtctcaaaacgagacagcatttgtaacagacacataggattgttttattaattgattcgtttttcagtctctaaatcaaagaagtgtcccttagcaatattaaaggttaattgtactttttctccgggactgtgagagtcacgagcattgacgcgagctgtaaattcagtactaccaaatttaacatataacatgctttcgctgcctaaaagttctgatactagtatgtcggctgtaacactggcatttgggaaagtctcgtggacaatttgatcacttgagatgtcttctggtcgaatacctaaagtgacttttttaccaagataacctttctcctcaagaattttttcctgtccctgaggaagcgcaaggcttagaccatcttggttaactaaacgctctttttcaacggtcacttcaaagaaattcatagcggggcttccgatgaagccagcaacaaatttattagcaggttcattgtagagttcctgtggtgttccaatctgctcaatacgaccgatagagccggttttatctgggtttggagtagcgctcatgataacaatacgatctgctaaggtcatggcttctgtttggtcatgggtaacatagatagtcgttgccccaatgcggcggtgaattttagcgatttcggctcgcatggcaactcgaagtttggcatctaaatttgacaaaggttcgtccattaagaagaccttagcatctcggacaatagcacgtcccatagcaacccgctgccgctgtccgccagagaggtccgcaggctttctttcaagaaattctgtcagtccaagaatttcggcagtttcgtgtacgcgtttattaatatcgtctttttgatatttacgaagttttaggccaaaagccatattttcataaacgctcatatgaggataaagagcataattttgaaaaaccatagcaatatcgcgatctttaggagaggcatcattcatgagtttatcatcaatataaaggttgccttctgtaatatcttccagcccagcaatcatgcgaagagtggttgactttccgcatcctgaaggaccgacaaagacaatgaattctttatcatgaatgtcaagattaaaattttcaacggaataatgctttgcattgggatatcttttgtagatgttatcaagttttaaagttgtcataatatcgtttccttactttcttttttatttaacagatccgccagtaatgccttcaacgtaatacttttgcatgaagataaaaagtatcgtgattggaatggcgatcagtacagaacctgctgcaaaggccatgaaccaattattaatggtatcagcttgaagcatagagaagagtccaatcgctacggtatatttgctggtggcatctccaagaataacctgagcaaaaataaagtcaatccaaggggcaataaatgccaacagggccgtataaacgatgatgggcttagatagcggcagagtgatttttaagaaaatatctttacgcgtggccccatcaatcatagctgattcatccaatgaataaggaatcgtatcaaaaaagcctttagcgatatagaaagttaaggcagctcctgaagaatagaccaaaacaagagatgttaatgtttgggtgagattgagtgcttttagaatgtagtaaactgcaatcatactcataaatcccggaaacatattcagaacaagagctaattttaaaaagccgttacggtgtttaaatttaatacgactaagcgaataagccattgccactgtgatagaagttgacagaacacaagtggctgttgaaacgattaaggtatttaaaaaccagcgcccaaatgggaaagaagaattggtaaataatttaatataattatctaaagtccacgtttttggaataatataaggaacataagctgtgccttcaccgcgaaaactcgtcagtataacccaaatgatcggaaatagccaaatgaaggataagagaatcagtaaagcatagatagagccgatctgaagttgtttttttcttttcattatttaacagccccttccttgtatgatgctgtatgcgtataagctaaaagactgaagatagctgaaatggcaaagataaagataccaataacagaagctaaattatagtctgcagcattcattgttagtttataaagccaagtgaccaataagtctgtgctgcctgcttgatagaattgtgaattagttggtccgccaccggttaaaaggtagatgacattgaaattattgatatttccaataaattgctggattaaagagggcatcataattaaaagaatctgcgggaaagtgatggatttaaaaatttggaacttactagcgccgtcaatttctgcagcctcaatttgctcactcggaagattcatgataattcctgttgcgactaacatggtaaaaggtataccaacccacatattaacgaagataattgaaaattttgcccaagtaggatctgatagaaatggcagagaatgagaaatcaggccaattttttctaggaaagcattgagcggaccttgatcattaagaaaatttctcatcagcaaaagtgaaatgaactgcggcacagcaatggtaataacaaagatagtccgccacatttttttcaattttaatcccttggcattgatgataagtgccaagatgactccaaaaagaaagtttgtcacagttgcgaaaacagcccagataagtgtccaagaaaggacagggaagaaggttccagccatgcggccattcaaaacattaccaaaattagccaaccctacccaatcaaaaagggatttaggcggaagatgattgtgatcataattggtaaaggccaggcaaatcatataaacgagtggcaaaatggtaaaaagaagaacaccaatcaaaggaataaacatcaaagtcatatggaatcggccgtttgccaaagtcataaaatcttctttgaaagatggaatgtgacgtccttctttttttaacatatagagatttctggcacttttaagattacaccaataaatgtaggcaaaaaccaaacaaaagattagtgaggctaatccaaaaatgagcatcagcatcgaattatcgccttcaactgccacctgtaatttaacgccatccacaattttttcttgcatcccttgtgttttagtaccgagagtgagtaagcctgaaaaagctggaataacctgtgtgacaaaagcaattagaaaagctatctcacttaatagaaagaggaagccttttatgaattgcttattcatcaaattggcaaatcccatgatgacaaacgataatttgatatctatcccaccctttttaaaagtttcaagtacagataactgatcatgagaagatgactgaatcatatttatctcctttactttattattaattcagttaaaagaataagtgagaagatttaatcccctcacttatgatgttttatttagcagctgctaaatctttatcaaattgttttaatttagcaaggtaatcactttctttaattttaccattgtacgtatcactaagaatagctgcgctttccgtccagaatgttgacatttggttgagtttaggcataacaacagtataatctgaagaagatcccatttggataacagcctgtgcgagttcatgatttttgactgtatcagagttttgaacggtcttattagatgggatgatgttgcgtccttttgtcttaaattgattttcttggctttcagcacttgttaagtaagaagctaatttataactagcagcaatacgtttggtatttcctttagaaggagcttgattaacagcgtagagtttaacacctaagaaagctttctgttgaacttcttgaccattaatatttattgttggataaaccgcaacaccgaggttgtttttgccaactgccttttgtgcggcttcataatcccaaggacctgattcaaaagaagctacagaaccatcaccaaatttagacatgacattattatcgtcaagattgacaaagccagcgttacctttttgactggcaatccatttcaaaacagatacaccagcatcatttccccagttagttcctttggcatcttcgccatttttaccaaagagtgtatcacctactgaatagaaaagtggtgcagtcgcataggcattaacttgtttgaattttgctccgaaagttgccttgctggtaatagtctcatatgatgtgacatcatcagctgagagttttgatttattatagtaaagtacttgagactcgattccaaaaggaaaagcataagtcttacctttgtacatagctcctgttgcagcctgctgtgtttcatttttatttatttcttttgaatatttttgaggaatctcttggataacaccagagtcaactaactggcccagctgatcatgcggcagcgagaaaacatctgcagcagtactaggatcttttttgatcttttcctgagcttttgggtcttcagattcaataatctttactttatagttagaatccttttcaaatttgtgaacgatactttgataagatttcttggctcctgttggaactcaaagtttaatggtcttgggatcagatgaacttgattttgaatcctttgatccacaggcaacaagaatactgcttgcaagcataaggcctgcaccgccaacgacgattttttgccatgttttcatagcgatttcctcctgaaatttctttgtaatttttgttacaataatattatgcaatcgtttgcgaaaattgtcaagtttttttaaaatttcatcaagatattaaattactttataaggaaagtcttaaagaaagactttttcctcaatctggttaatatctgattcttggaaaatataaaaggttaacaatcttgcaagcagagcagaactgttgtaaaatagattcattaaaataaaggaaaagtatatggttactattaaggatgttgcaaaagaggcaggtgtgaatccttctactgtcagtcgggttttaaaaaacagttcctccatttcgcaaaaaacgaaagatagggttcaacaggctatgacagatttaggttatgtgcctaatttagctgctcaaatgctggctagtggcttgactcactgtgtcggtgttgttttcccgcctttaacaagtccagatcgtttaagcgaaccctttttcatggaaatattggcagctattaataatgaagcaagccgtaataaattcacagtttcgattgcgaccagtaatactttgacggatctaaaagatcaggtacagctcatgtatcggcaagggcgagtggatggttttatcgtgctttactcagaaagaagggatcctgtacgtcaatatctgatcaaaaataaaattccttttgtcattgtcggtgctccagttgattataaagatgaaacgacctatgttgataatgataaccaattaatggctgaaactgctgtgacttacctcaatcaaaaagggcataagcagattttatttgtcacaaatgatcaagaaagtgatgtttatattgagcgttttatcggctatcaaaagggaatgcaagtattaggtttacagtcatatgacagtgctctttttgattctaaacaagctagcacgctagaagcctttgttaaaactgttcagaaaaaaaagataacggctctccttattattggggatgtcgtttctcttcggattattcaatttttatcttattatggtatagctgtaccagaagatatgtctattgtgtcttttaataattccagttatgccactattttgcatccttatttaacaacatttgatattaatgttaatcgtttaggaagagcgagtctgaattgtttgttggaaaaagtgcaaaagcgtcagtcaaaagatcagaaagtaatcgttccttttactttgaaaaaacgtgagagtgtccgtaatcttaaaaaagctagagattagaagcttaatttctaagctttttttattttttgaaaaaattcttgacttatgcaaacgattgcgttatactttttctatgaatgataataaaaaagcgaggagactatatggaaaaacgcgcaagtggtatcctgatgcatatcagttctctaccgggaaaatttggaattggtacttttgggcaggaagcttatgattttgttgatttcctaaaaaaaacaggtcaaacatattggcagctcttacccttaacgacaacgagttatggtgattctccttaccaatctttttctgccgttgctggtaatgtgaattttattgattttaagaaattacaagaagctggcttattggacgaggatgactataattctgtttcttttggagaagacgaagaaattgttgattatgctctattatttaaagtacgtcggccaattttggaaagggctgttatcaattttctggcagacaagactaatctgaaaaaattagctttgtttgaagaaaaaaatgaaacttggcttgatgactatgctgaatttatggccattaaggagcattttggcaataagtctttgcaagagtggggcgataaaaaggctattcgccgtgatgaggagcgtttggtacgttatcgtcatttgttggccgatgaaattagctaccataaggttacacagtacttcttcttcgaacaatggctggcgctgaaagcttatgctaataaaaataagatcaaaattattggcgatatgcctatctatgtagctaaagacagtgttgaagtctggactatgcctgaactctttaagatggatgatgacttgcagcctttgtcggttgctggctgtccgcccgatgaatttagtgatgagggtcagttgtggggaaatcctatttatgattggaaaaagcatcgagaaacaggctttgcttggtggatttatcgtattcaagaaagttttaagatctatgatatcttacggatagatcactttaaaggtttctcagattattgggaaattaaaggtaattccaaaactgcaaaaaatggtagctggcatccaggacctggtattgctctctttagagctgttcaaaatgttttgggcgatatgccaattattgcagaggatttgggttacgtagatgatagagccagacggcttctaaaagaaacaggctttccgggcatgaaaattttagaatttggtttctatgatttaagcggccgcagtgttgatattccccaccattatgttcaaaacagtgttgcttatattgggacgcatgataatgatgttgtcaatggttggtatgatcgtcttactgttgagcaagaagaatttgtggatgcttatactaatcgtaagccaattgagccggttaatcaggctatgcttagactgctcttttcaactgtcagcaatacagctattttaaccatgcaggatttgctcaataagccagccagctctagaatgaataccccatcaacaatcggcggtaactggcaatggcggatgagagcaaaagatttaacacaagataaaataaactttttaagtaaattaacgaaactttatcaaagaggaaatgaagaaaatgacacaaaaaacaaaacaattcagtaagtatgtccaagaaaaaaccggtcaaaatttggaacaattaagcaatgaagctatttatgttcagcttttgcactttgtcaaagaggctgccaaagacatgcctaaaaatacgtctaaacgtaaagtatattatatctctgctgagttcctgattgggaaattactgtcaaataatctgataaatttaggtctttataagaccgttaaggatgaattagctgctgctggtaagtccatcagccaagtagaagatgtggaattagaaccatcacttggtaacggtggtttgggacgcttagcttcttgttttattgattcgatggcaacgctgggtattaatggtgaaggtgttggacttaattaccactgcggactttttaagcaagtttttcgtgataatcagcaggaagctgaacccaattactggattgaagatgattcttggctagtgccaacggctatttcatatgatgtgcctttccgtgattttacgcttaagtcaaaattagatcgtattgatattttgggctatcacaaggatagtaagaattacttaaatctctttgatattgatggtcttgattatggcttgattaaggatggtattacttttgataagactgaaattaagaaaaacctgactcttttcctttatcctgatgattctgataaaaatggggaattgctgcgtatttatcaacaatatttcatggtttcaaatgcagctcagctcttgattgacgaagcgcttgagcgcggttcaaatctgcatgacttggctgattatgcctatgtgcaaatcaacgatacccatccatcaatggttattccagagcttatccgtctcttgaatgaaaaacatggtttagatttctatgaagctgtagatattgtgaaaaatatgattggttataccaaccatacgattttagcagaagctcttgaaaaatggcctttggaatatttaaatgaagttgtcccacatttggtaaccattattgaacatctagaccgtatcgttcgcagtcagtataaggatgatgctgttcaaattatcgatagagatgatcgggttcacatggctcacatggatattcatttttcaaccagtgttaacggagttgctgctctccatactgatattttgaaaaacagtgaattgaaacccttctatgatatttatcctgaaaaattcaataacaagactaatgggatcactttccgtcggtggttggaatttgccaatcaagacttggcagcctatattaaagaattaattggtgaaggttatcttgaagatgcgactgagcttgaaaaattattggcttttgcggatgacaagactgttcatgagcagctggcaaaaatcaaatttaacaataaattagctcttaaacgctatctcaaggaaaataagggaattaaccttgatgaaaattctatcattgatacgcaaatcaagcgtttccatgaatataaacgtcagcaaatgaatgctctttatgttattcataagtatcttgaaatcaaaaaaggcaatcttccaaaacgtaaaattactgtgatctttggtggtaaagcagcaccggcttataccattgcccaagacattattcatttgattctttgcttatcagagcttatcaataatgatccggatgttagtccttaccttaatgttttccttgttgaaaattataatgtcactgtggcagaaaaattaatccctgctactgatatttcggaacaaatttctttggcttcaaaagaggcttctggtacaggtaacatgaaattcatgcttaacggtgctttaacactgggtacgatggatggtgccaatgtggagattgctgaacttgtcggttcagataatatctacatttttggtaaggattcagataccattattgatttgtatgacaagggaacttatatttctaaggattattatactaataatgcagtcattaaagaagccgttgatttcatcgttagtaaggatgtccttgcgttaggtaaaaaagaacgtttagaacgtctttaccatgagcttatcaataaagattggttcatgacactgattgacttgaaagaatatattgctaagaaagaagaaatgttagctgattatgaggaccaaaatgtgtggaataaaaaggttattcaaaacatcgctaaagctggtttcttctcatcagacagaacaatccaacaatacgataaggacatttggcatagtttgtaaaaagaaatttatagaagctaaatgttagcctcatctcacttaaaaaagaaaagcgattgaatctatttcagttaaaatttggaatagaaattcaatcgtttttttatagagagactgtagatttataagaattagaatgaaaccactgctatccattttatgaaatgaatgaaaaattttagcctttttgagttacaacttttataaaaaagcttataatataggcaagaaagacttgatcttacatgtgaggtcaaatgaggtatatgttatgagtagcacagaacaagaaacgatgcagggaatagaaaaacttgtatctgatgatgtttatgaagctgcacaaaccagttcaaatggacttgaggcttctcaagttcaaaagcggcaagagttatatggtctcaatcggttgaatgaagtcaagggagagcctgtttggctgaaatttattaaaaattttaccagtatgatggcactcttgctctgggcaggcggtgcagttgccttctttagcgggacaattgaattggggattgccatttggcttgttaatgttattaatggtcttttctcatttttccaagagtatcgggccagtcaggctactgaagccttgaaaaagatgctcccttcatacgccagagtcatccgtgatggtaaggagagtaagattttagcagaagaactggttcccggagatgtcatgctgattgaggaaggagatgccatttcggcagatgggcgtattatcttttctactgatttgcaggtcaatcagtctgctttgacgggtgagtccaatcctgttcggaaaaataattatcctgttcttgattcagacacggaaaatttggaatttaaaaatatggtttttgccggaactagtgtatcaaatggcagtgccaaagttgtggtaacgaaaatcgcaatggcaaccgaatttggtaaaattgctgatttgacccaatcaatggaagatgaaaaaagtccgctgcaaaaggaattggacttattaactaagcagatttctttgattgcggtaactattggtatctttttcttgctggcttctgttttctttgttaaacaacctttagcccaagcctttatcttttctctgggaatgattgtcgcttttatcccagaaggacttttgccaacagttactttgtcccttgccatggccgttcagagaatggccaaggagcatgccttggttaagaaattatcttcagtagaaaccttgggtgcgacctcagtcatttgttctgataagacgggaaccttgacccaaaatgaaatgacagtcaaccatgtttggactttaaatcatgaatacgaagtgacaggtcaaggttatgcttctgatggacatttagaaagaaataatcaggaagttacagttgccaatgaagagggtttagagttcttgctgagagcagcagcactttgttccaatgcacgtgttctagcacctagtgatgaaaatcctcgttatacggttctaggagatccaacagaagcctgcttaaatgttgtggctgaaaaagcagggattgacttaactgaaaatgaaacttgggcacaaagagtgagagaattaccgtttgattccagccgtaagcgaatgacgactgtgcatcgactgaaacaacctgtaaatggttcgtccttcatttcaattaccaaaggagctcctaaagagacctctgagctttgtaacaaggtttatgagaatggtcagctgagagatttgactgatacagatcgggaagctattttagcggctaatgatgattatgcgcgtcaaggtttgcgtgttttagcagttgcctatcgtaatctagaagaagtagctgatctccccaaggccttgtctgactatagtccagaagtcattgaagaggatatggtttttcaaggtttagtggttatggcagatcctccgcgtgaagaagtggcagcggctgttgagttatgccgtaaggcaagcattcgtattgtcatggttacaggagattatggtttaacagctgtcagcattgccaaacggattggtattgtccaaggggaaaatcctcgtgtggttactggcctagaattaaaagatatgtcagatgatgacttgaaacaggccttatcagatgaagttgtctttgcccgtgtagcgcccgaacaaaaatatcgtgttgttaccaatctgcaagctttgggacatgttgttgctgtaacaggtgatggtgtcaatgatgccccagccttgaaaaaagctgatattggagtggcaatggggattacagggacagatgttgctaaagaatctgcggatatgattttgacagatgacaattttgcttctattgtacgcgctgttgaagaggggcgtgctgtctataccaacattcggaaattcctgacttatatctttaatagtaatacctcggaggccgtgccttctgcagcttttcttttttccaaaggaggtattcctttacctttaaccgttatgcagattttagcgattgacctaggaacggatatgattcctgcccttggtttaggcgtcgaagaagctgaagatgggattatggaacgtccccctcggcgtccaacagaccgtctgctcaacaaaggtttattgataaaggcctttatttggtatggccttttagaagcagctattgctatgggagctttcttctttacttatgctattggcggcggtttaagtgggcatttggcgtcatcaggtcagctctatcagcaggcaacaacaatgactcttggtgctattatcttttgccagttgggaatggtgatgaatacacgtactgaaaaggcctctatctttaaagtgaaactcttttcaaataaggtcattaattttggtatgatgtttgaaattttcttattctgtcttttagcttacctaccatttttacatggtctcttcaacacggcggcaataggtgtgtggcattggctctatttgattctctgtccaattccagttttgtttattgaggaagctcgtaaggcttatatgagaagaaaacactaattcattggtctcattgttatcaaaaggagggtagctatgaaaattattattgtcggatgtggtcgtttaggttctggtttggctaatcaattgagtcaagaagaaaatgatgttacggttattacgattgatgaagactatttagaagctttagatgatcattttacaggtcaatctttggtaggagttggctttgatagagaaattttagtgaaagcaggtattgagcatgcagatagtttaatttcctgtacagatagtgatgatacgaatgctttggtggcccgtattgctaaaaaaatctacaaagttcctaaggtcattgccagattatatgattccagtaaagttgatttatacaatgcgctaggcattcaagttattgcaacaacacaatggggtattgaacgaaccaagaacctgctgacctttaagcattttgattctgttttgagtctggggaatggacattctactgtagagattgtacgttttaatattcctcctttgttggataagaagaaaatagaagaggttctccctatccatgaagtgcgagtcatagccttaagtcgaaaaaatgagacgttcattcctaatagagaaacactactgcactctcgagatgttatccatttagctgcatcttctgatacggctaatcagttgagagaacgctttattttctgaggaggaagaagctatgaaaattattattatcggttgtggcaaggttggagcttatgtggctaagcaattattggattcgcatcatcaagtaacaattattgagcgagatcaaaaacgttttgagcaagtccttcaaatattttcccaagctgaggtcttacatggagatgggaccagtcctattttacttgaaaaatgttctgttgaaacagcgaatgccgttgcttatttgacgggaaaagatgaaatcaatcttgtagggtcaaccgttgctaaattcaactacgcagtagatcgagttgttgcccgtgtcaataatcctaaaaatgaatggctttttaatgcagatatgggggtggacagtcgtgttagtcaggccagcctgctagctagtgtgattatcaatgaagttaatattgaaagtacagcaacactacttaaattaaatgacgatgaaaatgcgattgttgaatttgttttatcaaaaggcgcttctgttcatggtaagactgtcaaaacaattaatttcccaagtgatgttgttttgatatctgttcatcgtcaaggacaaaatattattcctaaaggagagactgtgttattggaaggggatcacattctagcttatactaacagtcaaaatcaggaaaagctggcgcagctgttccgttagttttgcactttatagatattattataaagagatgaaaacgaagaaattccattcaatatcattgaatggaatttttaatagtataacttaactaactatcatcaaagttccgccgccaatcagtatacagccaatcaaagattttatgctaaagtcttcatgcagaacaagaaaagcaagaatgagggtaatcacaacgctgagtttgtcaataggaacaacctctgatgccttacccagttgaagagctcgatagtagcacagccatgaggcacctgttgctaaaccagaaagaattagaaaagtccagcttttcttgctaatgtcagttaaacccgtctgaccttttgttaaaaagaccatgccccaagccaagaagagtactacaagagttcgaatagcagttgctaagtttgaattaacatcctcaatcccaattttagcaagaattgaggttaatgctgcaaataaggcggaaagaaatgcaaataatgcccacataagtaagcctccttactgaatctatacaaggaaccttcctatattatctaggaaattcaacgattaaaagtttacgataagcctattataaatctttctataacaaataaaaagctatttcatttagtgattgtgattggcttttcttgccaatcagacttaggaggggtggtacgcatctaaaattggagattgcaggttccaatcaaccattgcgtcaaactatcacggctattttatatgacaatctcaaacttctgtaaccacagcggcaattggcagttattctttgtagatgacgatggtactagggcgagaaagcaccctaaatgattgctttatgttgtgaaagtgatagaactgcttatagttctatcatgaagggttgatgaaatctagactcaccaaaaagaatggaacttcctttttatagttgcttttaaaaattttcctttgactattaggctaaaaaactgtattataacaatatggatatatggacacagttaggacgcttttcggaatttgaaacgcagcgtcttttgatgcgctcttttgcttttaaggatcataaagatttttatgaaatagcaagagatgcgcagaatttagcatttatttttccttgtcaggcaaatttggcagaaagtgattttttgttggttcattattttatgaaaaatcccttaggaatttgggctttagaaaacaaacaggatcataaaatgattggtgctattagatttgacaagctagatataatagctaagagggctgaaataggttactttttgcatcgtcattattggaaacaggggctggcaaccgaagcacttgaaaatcttgtctttctggcatttcaagaactcgatctgaaagagttagaaattattgtccataaagaaaacagagcaagtgcaagagtggcagaaaaggcgggatttagactggttaggcaatttaagggaagcgatagatacacccataaaatgcgtgattatttgaaatatgatttaaaagcaggtgataaaagttatgagtaagcatcaagatattctggaatatttagaaaatctaacagttgggaaacgtgtcagtgttagaagtatttccaatcatttaaaggttagtgatggaacggcctatcgtgcgattaaagaagctgagaatcgcggtattgttgaaacaagaccacgcagcggtaccattcgtgtagagaaaaaggtaagagtacgtctcagtaaattaacttataaggaaattgctaatatcagtgagtctgaagtcgtttcgggcgaatcaggtctcggtcatgaattcagcaagttttctattggcgccatgacaattgataatgttcatcgttatctgacaaatgatggtcttttaattgttggcgatcgtgaagacattcaacttctggccttggaaaataaaaatgctattttggtgacgggggggttctcagtttctgaaaaagtccttgatacttctaatctattaggtattccagtgatggtcaccaattatgacacctttacggttgcaaccatcatcaatcaagccctgtccaatgttcgtattaagacagatattaagaccgtagatgaagtttatcaggaaaaagtttatcatggtttcttgcatgatacagatactgttagggattataacagtttaatcaaaaaaaccaaccatgtccgctatcctattatcaatagccatgacatggttgtgggtgttatcagtatgcgtgatgtggcaggtaaggaccctaatatggttctcaatcaattaatgacgagaaatcctgttgttgctaagtccaatcttagtttagctaacattagtcagaagatgatttttgaaggttttgacatgctgccagttgtcaaggaagattatagccttttgggggttattacgcgccgtcaggttatggaaaatctgcaaaactttcaaagaaccagttctcatacctatagtgaacaaatcacagccaatttacaggaagaaagaaccggctttcaatttgttgttgagcctgctatgattgactctgcagggaatctagctcatggcgttttgacagaatttataaaagacattaccatgcgtgttttgacacagaagcataaaaagaatatcattattgagcaaatgatgttatactttttacaagctgttcaaattgatgaccttttgaaaatacatcctaaaattattacagaaaatcgacggagcgcgactcttgactttgaaatttaccatggcagtcaagtgattacaaaggctgttgtgacagcaaaattaaattaaaaactaaggagttaaaaatgattacgttaaaatcacagcgtgaaattgaagcgatggatgaggcaggtgattttctggctagcattcatatcggtttgcgtgatttgattaaacccggacttgatatgtggaaaattgaagaatatgttcgcagacgttgtaaggaagagaactatcttcccttacaaattggtgttgatgggcagcttatggattacccctacgcaacttgctgcggactcaatgatgaagttgcacacgcctttccacgtcattatatcttgaaagatggcgatcttcttaaggttgatatggtacttggcggtcccattgctaaagaagacctagatgtctcaaaattgaattttgacaatgtggctcaagtcaaaaaatatacagatagttttcgtggcggtgtggctgattcctgctgggcctatgccgttggcgatgtttctcaagaagtaaagaatctaatggcagtgactaaagagtgtctctatcgtggaattgaaaaggcagtagttggcaatcgtattggtgacattggagcagctattcaagaatatgctgaggccaacggttatggtgtcgtccgtgatttagttggtcatggtgttggcccaaccatgcatgaagaacccaatgtaccgcattatggcagagcaggacgcggtctgcgtttgaaagagggtatggtcttaactattgaacccatgattaataccggcacttgggaaattgatactgatatgaacaccggctgggcacacaaaacgcttgatggcggattatcctgtcagtatgagcatcaatttgtcattacaaaagacggtccccgtattctaacgagtcagggtcaagaagggacttattaataggagcgacagtgaaaaagattatcgaaaaattacaggcaagccagtttgtccagaatttcttagaatattataaaagttctgaaatggatctgtccagtatagcagtggcttactatttgattttgaccatctttcctttcttaattttattggctaatttgtttccttatcttcatattgatacttcggaacttttgtctttcatgaaaaataatctaccagaacaactttatgaaaatacttctggtattgtcagagggatttttaataagccctctaccagtctcttgtggttagccattgtaacagggttatggactatgtcaaaaagtctgacctttttacagaaatccatgaataaatcttatggtatccagaatcaccgtgatttgattttaggacatattgtgggtattttttctagtttgctggttattttctttttggctcttgctattatgttgtccaccttcggtaaaaccgtattaacctttctttatcataattcttttcttaatcaagatttatatgatattctcatgaatttgactcagcccgtgacagcagccatctttttcgttgctttaggggttctctattatatcttgcctaatgtcagaattaaaaaaattcgctacattttgccgggaaccatctttaccagttttctcttttttaccatgacaagtttatttggtacttatattaactatgctacagctagcatggaaaatttacgtgtttttggttctgttactttgtttgttttgatgctgtggtttattgtctttgctagaattctgattttaggggctgttttaaatgccagttaccaaaaaaaatatgtcaaagaattcaagcctcgaagaggtaatattattacgattattcaatccagacatcatactcttaacaaagatgaaaaaaaaggagacgattaaaagctatttcaaaccgaagataaacttcttgttgaggtttgtctttttcttttgtctaaaacatgacaaaagtcatatgatgtcatgacattctgggctgaaatgtcttgctgtttttcgataaaatcatatcataaagaaaacgaagagggactatgaaaattaaaatttcttatattgtgtatgttgtcatcgcaactatttttgcagggttgagtatttttacagatatttttgaaaccttacactttgaggccatcttttcacacttgggactgatgattggcttgctgattgctgcttctgttttaattgggatagcgaaatcgcttattaaagaattgacggactaggggggatcatgagatcattgaaattactgctcatttttatcgtgattgtagcttttgttagtattttggctttgatgactgattattttgcgggcatctcactatggcatgtttacgcactcatgggcatttgtatgacactgttttatggaatttttccctattttaaaaaaatcgcagggaggaaagaaaatgacttatgaagaaatcaaactcagttttttgaaaggcggcattcgttcttacaaagtctttcaagggaataaactctactctcatactgtcacatctgagaacaatcagaggctgatttcgaaaagggtttacttaacaaaaaagaggcattacgtctactatgagcggacagatgttaattggaattactgggataaaggcaaagaagactcaagttttgaccccaatcaggttgaggaaaataatgtttttgaaattgcggatgatttgaaaacttttgcgaaatacttgggcaaagatattgttgagaaactagctgataaagttcagcatggcgagattgtcgagtatttggatatttaagatcaaactggaaaacatcatatggaggagcataatatggcgaacactgttataagcgtttcaaatttatccaaacaatttaaggcgaaaaaagttttaagggacatttcttttgaggttaatgagggtgactgtatagcgctgattggaccaaatggtgcagggaagacaacccttatgtcttgtatgttaggagacataaagactagttcaggtcaagtgctttttaaaggacaaaaaaataagcccaaagctcaggtagcagttctcctacaggaaaatacaatcccttctgtcttaaaagttaaggaattgattgtattctttagggaaattgcagatgattcattgactgaagaagaaattaggcaattattgcagttttcagatcagcagtatgagcaactggctgggaaattatctggcggtcagcgtcgtctcttggcttttatcctttgtctgattggaaaacctaaggttctctttttagacgagccaacggcaggtatggatacttccacacggcaacgtttctgggagattgttcatgatttgaaagaaaatggaacgaccattctctattcgtctcattatattgaagaagtggagcatacagcggatcgcattttggtcttgcaccaaggacaactgattcgggatacgaccccatttgccatgcgcagtgaggatagagaaaaacaagtaaccttatctattacttatgctcagctagttcatagtcttgataaggtctacgacatagaagaaaaacgggatacggtaacctttatgaccaaggatttggaacaaatatggtctatattgcagaaacaaggttgcagtatttcagagattgagattcaaaataagactctattaaataccctgtttgattcgacaaaaggagaagaagcatgaaagcattattaaaagttgagtggattaagacctggaggacttggcccatgttcatcatggcggttgggatgccagttggtttctttcttatttattcaggaatgaagatgtatgacacaacacaagggcagacagattttatcagatcatttatgattactatgaccgccttttctatgtcgagttttggaatcttttctttcccttatatgcttaaggaagaccaaactaatcattggttaagctatctcgaacattctaggatttccatttataaatattatctgtcaaaaatttttcgagttttgctgaattttttagtttctattattgtgacttttatgattggtgcttttgttaggcatgtggaaatgacaccgattcgctggataggaacaagtttactgttattaatggctagcttagtctttctagctttagggcttttgattgaacggattaaatccgaacaaatcatgtctattgtaggaaatattgcttttttgggtttagccattctagggggctcttggatgcctattactatgtttccagactgggtacagtctatctctaaagtttctcccatttatcacgttaaccaattagcggtcaattttgctcaaaaaggtcagctgacatggaattccttgtttattacactggcttatgccataatagtagcagggcttgccctattcattaaacaaaaacaagaggttgaaagtgtttagacgacatcaaaagaatgacttgccttattatatagggctcgtctttctcgtttttcccattttaggtactgcggcaaactattatcctatgtggactttaattttaaccgctggttttacagctgcctatctgcttttagttcggctgaaggccagctatcatagggtaattgcagtcttatggttttacacactggcttacattgcttttatgactctagcttatgaaggagctatgatgtggtttcttttttatcatgtcaatctattggtttggcggtttggagacagctatcggtcttaccgctttttatccttttctctggtcactttttttctggggattaatggcattatttatgggattgttcataggaacagtattgctgtctttttgatgtccatcacacttccaatttttgtatttggcatgtactatttccaaaatcatttacgtttgcaagaaaaaatggaagcagagattgttgagcaaaaccgcaccatcaatatcctatctgctgaaaatgagcgcaatcggatcggccgtgatttacatgacacattggggcatacctttgccatgatgagtctcaagacggagctggcgcttaagcaaatgaaaaagggtcggtacgaagccgtgcaaaagcaactagaagagctcaatcaaatcagtcatgattccatgcatgaggtgcgcgaacttgtcaatcatctcaaataccggacagtgtcggaggagctgactgaaatggagcgtctctttggtttatctgatatcagtctatctgttgacaatcagttggacttggacagcttatcccctgttactcagtctactatgaccatggttctgcgggagctggctaataatgtcatcaagcacagtcaggctgatgactgtcagattacgatcaaacgtggggaggggattgaagtaactgttgaggataatggtgttggatttgatgaactgacaggtcaggaattgcactctattcgtgaacggcttggtctggtcaatggagaagttgaagttacctcttctaacaatccgacagtcgtcactatttacctaaatgaaggaggacgtcaatgaaattactagttgctgaagatcaatctatgctgcgagatgcgctctgccaattactgcttatggaagatgatgttgaagagatttatcaggcagctgatggtcaagaggcaattgagctacttggtaagcaaacagttgatgttgctattttagatattgaaatgccaatcaaaacaggtttggatgttttagagtggattcgtcagcaccaagatactaaggtcattattgtgacaacgttcaaacgttctggttatttcaaacgcgctttagcagcccatgttgatgcttatgtacttaaggatcgctctgccagtgaattaatggcaaccatttatactgtcctttcaggtcagcgggagtactcaccagagttagttgaagaggtaacctttgacagcaatccgcttagtgaacgggaacaagaagttttacaattggttgctaaaggagcctccaatcaaacaatagcagagcagctctttttgtccaatggaactatccgcaactatatgacagctatttttaacaagcttaacgccaacaatcgaacagatgcagtccgtattgcgcgtgagaatggttggttctaactgcagaagaaaaaaattcagtacctgttttgcagaactgaattttttaacaaaaggaatgattggttgtagggagccctgattagctctcttttttatttttaaaaataaagaatttactgatgatataattggttgccataatcaaaaactgtgaaataatggtttcaataaaattaatcatatcatgattgtttctgacaaaacggccgataatacccggaaacttgtcaacaagtaaaaaggccagcagcaaatcaagtgctaaggttgatagacgggcgatgaaaaattgaacaaaacgtttcagccagccttgacgtttttggttaaaaacaaaataatcattggtaaagaaggcaaaggtaatagaagtgacattagcaatgactgctgaaagagtagcttctttagtaatgaaaaagagcggcgtccgtgttagaaaatagacaaaggtagtcagaatgccgaaaaaaatatatttggaagtttcatgggtaataatcttttttagggtttcattgcgtagtaatcttttcataagattactatatcaaaaaaattgaaaatatgctatactggataagttgtctgacaacccttggtgcttatttccctttcaccaagcatattacaaacggtagaaccgttaaaggagaaacaatgaaacaactaactgttcgtgatttagcccatatcgccattgtggcggccgtatatgtcgccttgactgcgactccgccgttaaatgccatctcttatggtggtatacaatttcggctttcagaaatgcttaattttttagctttctataatcctaaatacatcattgccgttactctaggctgtatgattgccaatacttttgggactattggtcttcttgatgtctttgtcggcggtggttcaaccttagtttttgtaacattaggcctgatccttttttctaagtataaaaaggaatacatttttaatggcctctttaataaagccttcttttacttttctgtgttttacgctatatttatggtaacgatagcagcggaaatttctcttgttctccaaacgccatttttactgacttggataactgtagcagtaggagaattgatttcctctctttttggggctcttgtgattgataaattggcccaatatatagattttacaagatagtcttcttcggaagattattttttatgagaaaataaagattttgcctataaccgatttgaaaaaatcagctcttaataatcattctaataaacgtgaaagttgcttttctttctttacactgcttttaattctttaaaataaagctttcccttttcttttataattaaaaattagttaaagctagtgaaaatatggtaaaataagagatatgaaagaacgtatgaatgagctggttcagcttcttaatcaatatgccagagaatattatacaaaagataatcccagtgtttcagatgctgagtacgataaactctatcgtgaacttgtagaacttgaaaaagaatttccagaggatattcttcctaatagtccgacgcatcgtgtgggtgaccttgttttagatggttttgaaaagtatagacatgagtatcctttattttctttacaagatgctttttctcgtgaagaattagatgcttttgataggcgtatcaaagcagaatttccgcaggctgactatttggcagaattgaaaattgatggtctttctatttctctaacctatgtcaatggccgtttacgagttggggctaccagaggagacgggacagttggtgaaaatatcacggagaaccttaagcgtgtgcgagatattccactgcatttacctgaaaatattgatttgacagtacgtggggaatgctatttgcctaaagcttcctttaaaactatcaatgctgagcgtagggaaaatggtaagactgaatttgcgaatccgcgaaatgcagcggcaggcactttgcgtcaattggatactaaggttgtggctaaacgaaaattggcgacctttatctatcaagaggctggtccgacagctgccagcagtcaggaagcagtactagaaagttttgccaagctcggttttacagtcaatcctcgtcatattatttcctcctcaatggatgctatttggcactttattgaagatgttgctaaggaaagggctgaacttgcctatgatattgatggcgttgttatcaaagtgaacagtttggccttacaagaggcgctcggttttacagttaaagcacccagatgggccattgcctataaatttccagctgaagaaaaaacagcagaaattttatcggttgactggacagttggtcgaacaggggttgtgacaccaacagctaatttaacacctgttcagctggcaggaacaacggtcagccgagcaaccttacacaatgttgactatattgctgaaaaggatatccgaattggtgacatagttgttgtttataaggctggagatatcattccggcagttttacatgtcgttgaaaacaaacgtgaccagcaagtgccgctaccaattccaacagtctgtccgtcctgtcagagtgaactgatccattttgaggatgaggtggctcttcgctgtgttaatccacgctgtccagcccaattaaaggagaaattgattcattttgctagtcgtgatgctatgaatattataggattaggtccagctattgttgaaaaattatttacagcagaactcatttgcgatgtggctgatatctatcagttgactcctgagaatcttatgcagctcggagggatcaaggaaaaatcagcaactaagctttataaggctattcaggcttccaaagccaattcagccgaaaaacttttatttggattgggtattcgtcatgtcggcagtaaggcgagcagacttcttatggaacgctttgagagtcttgagcagttagctgctgctgattttgatgatattgctgctattgatggtttgggaattgttattgcagagtctttaaaaacttactttgcaacagcaggcgcacagaaacttttgatagagttaaaaacagcaggtttaaacttgacttatctcggcaaaaaaacagcaagtgatgctgctttaactgggatgacaattgttttaactggtaaactagcaaacttgacccgcagccaagctaaagaaaaactacaaagtcttggtgctaatgtagctggaagtgtttctaaaaaaaccagtctggtcatagcggggagtgatgcaggttctaaattagaaaaggctaaaactttaggaattgaaattaaggatgaagcttggctagaaagtttgtgataggagagagaaatggtaagaaaacaaaaacgtgcacgtttaatttacaatccaacttcaggtcaagaaatcatgaagaaaaatgtagcagaagttttagatatcttagagagctttggctacgaaacgagtgcctttcagactacgcccagagcagattctgctaaaaatgaagctgcacgtgccagtcaagcagggtttgatttagtcattgctgccggaggtgatggcactatcaatgaggttgtcagcgggattgcacctctgaaaagacgtcctaaagtggctattattccaacggggacgaccaatgattttgctcgtgctcttaaaatcccccgtggcaatcctgttgaagcaactaagctcattggtaaaaaccagaccattcatatggatattggtagggcttataatgacaaatatttcattaatattgccgcagcaggcagtttgacagaattgacctatagtgtgcctagccagctaaagacaatgtttggttatctcgcctacttagtcaagggggcggagctcttaccacgtgttcgaaatgtccctgtcaaggtcttttatgatcatggcgtttttgaaggtgaagcttccatgatttttgtagctttaaccaattctgttggaggctttgaaacgattgctccagatgctaagttggatgatggtaagtttacgctcatcttagttaaaacggctaatctttttgaattaacagatcttattcgtcttgttttaacaggtgggcggcatattaatcacaaaaagatcgagtatattaaaaccagttaccttaaaattattcctcaagggaatcctcctaagcggatgatgattaaccttgatggagagtacggcggtgatgcaccgattgaattgcgcaatttaaaaaatcatattgaattctttgctaatacagatgaaatttcagatgatgcgattactcttgatacagaagaactggtgctagaagcaattgcccagaaatttgcgagagaagcagaaagtctggatgagatggataaaacaaaagagcaagattagttaggtaaaaagacatgaaacataccgtagtcgtacattaccatagtaatacagaaaattattttgagtttagcttatggcaatggcagagcggacagatgggaagggatgcctctttctcacgttttgataattttggaattgttgggaatctcgtttatgagtctgacacttttcaaagtcaagtctatctgattgtcaaaaatgctgactggtccgttagaacgcctgattttagtattaattgcaatcctggtctgtctaaaagcgaggtttggattgttcaaggggatgatacgctttattattcatggcaagcagcagttgcaagccatgcttataatcaacgtcagccgcatgcttttgatatggctgtcaatagtaagcgttttgattatgaatggggctttcaaggctggcttggtttttcttatcaagaagataaaactgaatttcggctttgggcaccaactgctagacgggttgaattaattatttacagttcaactggtgaaaaatcaagtgttctcaaggttttaaaaatgaagcgcggggaaaacagaacccctgatgatcatacaaaaaatacacatggggtctggaagcgtacagtcgaaggtgacttgaattatcatgcctatcgttaccgtgtttattatcgcagacgtatttttcgtgatacaagagatccttattctattgctgtgacggctgacgggaaacgttcaattgttattgctgatactgatttaataccggaaggttttaaagtcaaacacaggcaagaggctagttggcgtcttagcaatcctaaccaagcggtgatagcagagatgcatatccgagatttttctaaatctgaaacttcaggtgtcaggcatgaaaatcgcggcaaattcttaggtgcttttgaaacaggaaccaaaaatttatatggcgatcaaacaagttttgattatctcaagagtttaggtattaattacgtgcagctgcagcctgtttttgatcatcaccagaccttcaatgaagatggctcttacgcctataattggggttatgatcctgaaaactataatgttccagaagctagctttgcgagcaatcctcatgcaccgaccgctcgtattttagaattaaaacagctcgttcaggcttatcacgatgcaggtattggtgtcattatggatgtggtttacaaccatacctattcttccacagattctgcttttcagctggcagtgcctgattattattatcgtatgaatcatgatggttccttgcaaaatggttcgggctgtggaaacgagaccgctagtgaaaaagaaatgtttaggaaatacatgattgattccattctttattggattcaagcctataatattgatggttttcggtttgatctgatggggcttcatgatgttgaaaccatgaatgctattcgtcaggctgttgatgctatcgatccaaatatcttgctttatggtgaaggttgggatatgggaatagggctcatgccagaagataaggctaaaaaagataatgcttatcaaatgccgcgtattggttttttcaatgacgatgtgagaaatgctattaagggtgctgaagtttacggcgatttcaaacgcggttttgtatcaggagagcctactgagaataaaattgccaagggcatgttaggcagtgacgaattaagttcttatttggtaccgaaccaagtactcaattatgtagaggcacatgacaattataaccttaatgatctgcttatggaattacatcctgaagatgataaaacaactcatattaaacgtgttgagttggcaaatagtctggggattttgatgcagggaatggccttcattgaattaggacaggaatttttacgaactaaactgtttccaacgggtccagatggggaattaacccatgctgataaagaacgcgcaatgaatagttataatgcccccgatgaggtcaatcaaattgactggaataatgtaacactttataagtcaaccgttaattttgttaaagaattaattcgtttaaaaacacaagaagaggctttttcttatcagacctatgaggacatccgtaagcatgtttatgttgagtcagcagaatatggatctggcttagtgattgtcagcataagtagccatgataaaattttcaaattaattttcaatgttagtgaaaaaaacgctaaaattgatatgacacaagatgaaaagtatgatataatattaacaaatataaaacgctttcataaattgagtggacaacttgaaaatttgacagctacggtctttgaattaaaaaaataatccaagttttcttggattatttttgttttcttatagcaatttgttttctttaaatggtggaatagtccaatgaatgcagcacagtcaaaagtctggaaatactcctagttggtataagataaacggaacgaatgcagcaacaaaggaagataaattgctaattgagcgtttctgtcagaaggatttggtaagcgatataaaagaggaggtgatacaatgaatgagagagaagcactcagaacatttggaactggagaaaactttcatgcacaacactactttggatttcatgaaactgaaaaaaatggcgtaaagggttatattttcagggtttgggcgccaaatgctgaggatcttcatcttattggtgactttactggctggtttgataatcccttacaaatggataaaaatgaggcaggcgtttgggaagtctttacggatttacctaaggaaggccatatatataaataccttgtgaagcgacaaggtgggcaaattgttgaaaagatggatccatttgctatttatttggaagagcgtccgggaacgggttctctcatcagaaccattcctgaaaagaaatggaaagatggtctttggttgggccgccgtaaacgctggggattctttaaaaggccagtcaatatttatgaagttcatgcgggttcttggaagcaaaatgaagatggaagtccctatagctttgaacaattaaaggatgaattggttccttacttagtaaagatgaattatacacatgttgaattcatgcctttgatggctcatcctttgggcatgagctggggctatcaattgatgggcttctttgcctttgagcacacctatggtactccagaacagtttcaggattttgttgaagcctgccatcttaataatattggtgtcattgttgactgggtgcctggtcactttacacaaaacgatgatgctctggcttattttgatgggacaccgacctttgagtatcaggatcatgaccgtgcccataattatcgttggggagctcttaattttgatttgggtaaaaatcaagttcaatctttcttgatttctagtgctaaattttggatagatttctatcatattgatggtattcgtgttgatgctgtcagcaatatgctctatttggattatgacgaagggccttggcagcctaacatagaaggtaacaatcgcaatctagaaggttattattttttgcagcgtttaaatacagtgctcaaattagctcatccagatgtaatgatgattgcagaagagtcaacagctacaactaagattacgggcaggcgtgaagaaggtggtctgggatttgactataaatggaatatgggttggatgaatgatattttgaaattctatgaagaagatccaatttatcgcaaatacgattttaaccttgtgacgtttagttttatgtatctcttttccgaaaattttatcttaccattttcacatgatgaagttgtgcacggcaaaaagagtctgatgcataaaatgtggggggatcgttataatcaatttgctggtctgagaaatttatatacttatcaaatctgccatcctggtaaaaaactgctctttatgggaagtgaatttggccaattcttggaatggaaatatgaccatgcccttgagtggactaatcttgaggaagaggacggacttaatcttaaaatgcaagattttaccagccaactcaatcaattttataaagatcataaggtactctggcaattggacaccagttatgatggtttagaaattattgatgctgataatgttgatgaaagtgtcttgtcttttatcagaaaaaatgagaagggagatctattagtctgtgtcttcaatatggttcctgtggaacgcaaaggttttacaataggcgttccggttgcgggtatatatgaagaagtatggaatactgaacttgaggaatttggtggagtttggaaagagcacaatatgacagtcaaaacacaaaaaaatttgtggaaggaatatgaaaatacgctcagcttcactttgccagccttgggtgctagtatttggaaaataaaacgtcgtttgaaaaagtaaaaacttatttgggaaggaaatgcatatgaagaatgaaatgttagctcttattcttgctgggggacaagggacacgacttggaaaattgacgcaaagcattgcaaaacctgctgtccagtttggcgggcgttatcgtattattgattttgcactttcaaattgtgccaattcaggcatcaataatgttggtattattacacagtaccagccactggctcttaatagtcatattggaaatggctcaagctggggtttggatggtattaattctggggcaacaattcttcaaccttattctgcaacagaaggcaatcgttggttccaaggaaccagccatgcgatttaccaaaatattgattatattgatagtattaatcctgagtacgttcttattttgtcgggtgatcatatttataagatggactatgatgatatgcttcaaacccacaaagataatatggccagcttgacagttgcagttatcgatgtacctcttaaagaggctagtcgttttggtattatgaacacggattctaatgaccgtatcgttgagttcgaagagaaaccagaacagccaaaatcaaccaaagcttcaatgggaatttatattttcaattgggatcgtttacggaccatgcttgttgatgctgaaaagaacaatattgatatgtctgactttggtaaaaatgtcattcctgcttatcttgagtcaggtgagcgtgtttatacttataattttaacggctattggaaagatgttgggaccattgaatcactctgggaagctaatatggagtatattggcgaagacaatgaccttcacagccgtgatcgttcttggaagatttattcaaaaaacttaatcgcaccgccaaactttatcaccgaagaagctcatgtaaaagattctttagttgtggatggctgttttgtttctggtaaggttgaacattctattttgtcaaccaatgttcaggtcaaagaaggtgcccaaatcaaggattcctttattatgagtggtgctgttattggcgaaggtgctaaaattacacgtgccattgttggcgaaggtgccaagattggtgaagacgttgagattgatggtactgaagaagtccaagttattggttataatgaagtagtgggggttccaaatgaagattgataaatattctgcaattctaggaagtgctatcggattcccagaaatggaaggattaacagatacgcgtcccttggcaaatctgccttttgatggtaaataccgcttaattgactttcaattatcaaatttagcaaatgctggtgttcgaagtgtctatggtattttccgcggacaaaatattcgttctatttttgatcatatcagaagcggccgtgaatggggtcttaatacactcttaagtcattatttcctaggtttctataatacaccagaagatagtatttatgccgataaggattattatgatcaaatcttgacttatttaaaacgttcaggttctgatcaaaccatttacatgtcttgtgatattctgtgtaatattgacttgcagcaagtgattcatctgcataatgctaataaacgcaatataacagttgtttataaaaaattgccaatcaatgctatttctgcagctaatgacattttagaaattgatgaaacggatactgttacgggacgccgtgatagtcagtctggtaatgaaacagaaaaaatgtctgctggtatctatattgtgaataccttttggttgattgagcagatggaaaaagaaaatcaaaaagaagaaccgattaatcttcgtttcttattgcgtgatttgacagtagctgagaaagctcttgcttttgaatacactggttatttggctaatatttcttctatccagtcttattacaatgccaatatggatatgctggaatctcaaaaattttattccttgctttattctaaccaaaaagtttatactaaggtcaaaaatgaagaagcgacctattttgcagtggattcgactgtaaaaaatgctcagtttgcttcaggaagcatcatcaaaggaactgtagatcattccattatttcgcgcaactgccatattgctaatcattcccgtgttgttaacagtgttgttttccctaaagtaagcattggtgatggtgcagtagtagagaatgctattcttgataaaaatgttaagattgctcctggagtgaccattcgcggtacgggagataaacctattgttatcgcaaaagcaagtgaagttgttgaggatattattcaatgaaaatcttatttgtagcagcggaaggggctccttttgcaaagacaggcggtctgggcgatgttattggtgccttgcccaaatcccttgtgaaaaataataatgaagtcagtgttatccttccttattatgatgttgttgatgctaaatttggtgaccaaatagaagatctgttctactttttcaccaatgtcggctggcgtcgtgaatatgttggtatcaaacatatcttcagagatggcgttgacttttactttattgacaataagcattatttttatcgtggtcaaatctatggtgaatttgatgatggtgaacgctttgcttacttccaattagctgctttagaagctatggaaaaaattcaatttattccggatattcttcatgtccatgattatcacaccgccatgattccttacttgctaaaggaaaaatatcattggattaatgcttatcatgggattaagacagtatttaccattcataatatcgagtttcaaggtcaattcaatccttctatgttaggagagctttttggagttggtgatgagcgttatcgtgatgggacgttgcggtggaatgattgtctcaactggatgaaggcagcggtgctctatgcagatcgtgtcaccactgtttcaccatcttatgctaaagaaattatgactcctgaatttggtaaaggactggatcaaattatgcggatggaatcaggtaagttaagtggtgttgtcaatggtattgacacggacttatttgatccggaaacagatccacatctggcagtgcatttttcaaaagatgatctgtcaggtaaagctaaaaataaagcagccttgcaggagcgtgttggtttaccagtacgtgaggatgttcctttggttggtattgtctctcgtctgacagatcagaagggttttcagttggttgttgatcaacttaatacaatgatgcaactggatttacagattgttttactaggaacaggctatgctgattttgaaaatgcttttgcttggtttggtcatgcttatccagacaaaatgtcagccaatatcacttttgatttagaattagctcagcaaatttatgctgccagcgatattttcttaatgccgagtgcatttgagccttgtggcttgtcacaaatgatggctatgcgttatggtaccttaccgcttgtacatgaagtaggcggacttcgggatactgttattccttataatgagtttgaaaagacaggaacaggttttggtttccaagacttctcaggttattggctgaccaaaacgcttgaagctgcgctagatgtctattataatagaaaagaagactggaaaattctccaaaaaaatgcgatgacaactgacttctcttgggatacagccagtcaatcttatgaacatctatataaagaactagcttaggctagttctgtcccttatgaaaggaaaaaaatgcaactaacaaaggaaaaattcattcgtgactttaaagacactctgcatgaagagcaattaattaagatacctgaagcaacaccgacggaactttttgcttctttggctaaggttgttcgtaaatattatacgccgctttggttagaaagaaatcgcaagatttcccaaaatcagcagaaggtagcttattatttttcaattgagtttcttcccggacgtatgttggaaactaatttacttaatctaggtatcttagatacggttaaggaagggtttgctgaacttggtgtcaattttgaggatgttaaaaatgctgaacatgatatggcacttggtaatggcggtctcggacgtctagcagcagcctttatggattcattagcgacaactggttatcccggttttgggaatggccttcgttataaatatggtctctttaagcaacgtatcgttgatggttatcaggtggaactgccagactcttggtttggctctgtcggcaatgtttgggagacacgtaaggatcatgatgctgttgaagtaaaactttttggcaatgtttatttgcaggctaatgaaagaggacgcattgttccggtttatgatggcgcacaaatcctgcgtgctattccttatgatgttccgcaaattggttttggtaatgataacattaataatttgcgactttgggatgttgagattcctgaagaatgtgaattgaattacccaactctggaatcacgtcgtcgtgttaaaaatattacggctattctctacccggatgattctaattatgaaggtaaagagttacgcttgattcaagaatactttatgacaagtgctggtttacaaaccattattaaatcttatcttaaacaaggtttaccgctagaaagaattcacgaaaaaatttctgttcatatcaatgatacccatccagcagtagcacctgctgagttcatgcggttgttgattgatgaatacgatcttgagtgggatcaagcatgggaaacgactgtgcaaacgatgagttatactaaccatactattctttcagaagctcttgaaaagtgggatgctgggcttttcaagaatgtcttgcctcgtgtttatcaaattattctggaaattgataaccgttttgttgctggtttagcccaaaaaggcattgatcctcaaattattgaaaatactcgcattgttaaagataatcaaattcatatggcaaatttggctatcattggcggtcactctgttaatggtgttgcgaagcttcatacagaactgctcaaagaagataccttgcatgatttctataccctttatcctggaaaattcaacaataagactaatggtatcgtacagcgtcgttggacacaaattgcagcaccagaattatctgcagcgcttgatcaaacgattggtaatagctggcgcacagatattcacgaattgagaaagttaaatgattttgtcaatgattctgctgtacttgatcatttttatcaggttaaacaagatgccaaggcaaaattagctgcttatataaaagaatcaacaggcgtggaggtctcaacagatgctatctttgatgtacaagttaagcgtctgcatgcctataaacgtcagctgctaaatgttcttcatattgtgaaattgtattgggagctaaaggataatccaaatcttgatatggttccgcgtgtctttatctttggagccaaagcagcaccgggatatcattttgccaaatctgtgattaaaattattaatgaattagccaatcttattaataacgatgaaagccttcaaggaaaactcaaagttgtctttcttgaaaattataatgttagtctagcggaacttatcattccagcagccaatgtttctgaacagatctctctagcttccaaggaagcctccggaacgtctaacatgaaattcatgatgacgggtgctgttactttagcaacgcttgacggtgctaatattgagatcaaagatgaagttggtgatgagaatattgtcatctttggtatgaccaaggatgatgtctaccgtcattatgaaaatcatgattattactcacgcggtgtctatgaatctaatcctgttatcaaacgtgttgttgatacctttatcaatggaacgattcctaatagtcaaagtgaagggactgaaatttatgaagccctgattacccataatgatgaatatttcttacttgaagattttatagcctatgtgcaggctcaagaaaagattgatgctctttatcgtgataaagaaacttggtcgcgtatgagtttgcgtaatattgctaactctgataaatttacttcagatgatacgattacacaatatgctaaagaaatttggcatttagaaatttaagccttcccaataagagacttagacaaaagcgtttaagtctcttttttgacctaatatttataagataagtaatcaaattaaaagcgtcttctataatgttgagaagtgctattgataatttaaaagaataggttaggaaaagtctaagaaaacgcaaccaaatttcttgttttcattgacaaacctgcaaaataggactaaactaaacaagtaaaaaaattttgaaggagaattcattatgttgaatttaaagattttagcacttgggattgctgttttaggcgttagccttggtgaaggaattttagttgctaatattgcaaaatctgcagctcgtcagcctgaaatgtatggtaaattacaaacgctcatgattatgggtgttgcctttattgaaggtacctttttcgtgcttcttgcttcaacattctttgttggctgatttcataataagaaaagggggaattagagttggaaaaaacaataaatccaacggttaaattcttaggtattgagtttgacttaaccatcttgatgatgtctctcttagttgttcttattgcattcttatttgtcttttggacaagccgccatctgaaaataaagcctacgggcagacaaaatgttttagaatggatctatgattttgtccttggaattatcaagcctaatttaggttcttatactaaaaattacagcctatttgctttttgtctcttcctttttgtttttgttgctaacaatattggtttattaacaaagattcaagttaaagattataatttatggacttccccaacagcaaattttgcagttgattttggtctttctttaatggtggcggtaatctgtcactttgaaggtattcgtaagcatggcttgaaaacatacttaaaggattatttagaaccgacagcagctatgttgcctatgaatctcttagaagaactaacgaatattatttcactgtctcttcgtttatatggtaatatttatgctggtgaagttgttatggcgcttttggtacagtttgctgattttagcccgtatgcgacaccaatagcctttctgcttaacatggcttggattggattttctattttcatctcaggaatacaagcctatgtctttgttcttttaacgacgacttatattggtaaaaaggtcaatattgatactaaaggcaattaagaaaggagcagtgatttatgtcaacacttattaatggaacaagtctaggcaatttgcttatcgtgacaggatcttttatccttttattacttctggttaagaaatttgcttggtctcagctggcagctattttcaaaacacgagaagaaaaaattgcaaaggatattgatgatgctgaaaattcacgtcaaaatgctcaggttttagagaataaacgtcaagttgagcttaaccaagctaaggatgaagctgcccaaattattgataacgctaaggaaactggtaaagctcaagagtctaagattataacagaagctcatgaggaagccggtcgtctaaaagataaggccaatcaagatattgctacaagcaaggcagaagccctatcaagcgttaaggcagatgtgacagatcttagtgttcttttagccgaaaaaattatggcaaaaaatcttgataagacagctcaaggtgacttaattgatagctacttagacaaattaggagatgcctaatggataaaaaaacgcaggctgtgactgagatctatgccaagagtcttgttgaagtcgctcttgaaagagattcagtccctattatctatgatgaagttagagcaattttgagtgttcttgatgatcagcaagtacaagattttttagcaagcaaggcaattgatctgtctgctaaatctgaagttgtaagactgtttcaagagtcttgttcgaactatatgaaacagtttcttgagattatcttacaaaatgaacgtcagcagcttctttatcttataatgaaagaagttttgaaagagctcagtcttaagacacatatctttgatattgaggtaacgacagctgtcgctctttcagatgatcaaaaagaacggttgacagcacttgttgaaaagaaatttgccctaaccaaacgaaatcttattgaaaaaattgatgatgaaatcattggtggttttattattaaagcaaataataaggtaattgacactagtattcgtagccaattacaagaattaaaaatgaatttgaaatagaaagtggtgtgatttttggcaattaacgcacaagaaattagcgctttaattaaaaagcaaattgaaaacttccagccaaattttgatgtcacagagactggtgttgttacttatatcggtgatggtattgctcgtgcttgcggacttgataatgctatgagcggtgaattgcttgagtttgacaatggaactttcggaatggcgcaaaaccttgagtctagtgatatcggtattattattcttggtgattttaatagtattcgtgaaggtgacacggttaagcgtactggtaaaattatggaagtaccagtcggccagtcgcttattggccgagtcgttaatccgcttggtcagcctgttgatggtctgggtgaaattgaaacgactgcgacacgtcctgtcgaagcggcagctcctggtgtcatgcagcgtcaatctgtttctgaacctttgcaaacaggaataaaggccattgatgctttggtaccaattggccgcggacagcgtgaattggttatcggagaccgtcaaaccggtaagacttcaattgccattgatgctattattaaccaaaagggacaagatatgatttgtatctatgttgctataggtcaaaaggagtctactgttcgcagtcaagtggaggttcttcgtaaatatggcgctcttgattatactattgtagtgacagcttcggcttcgcaaccttcacctttgctttacattgctccttatgcaggtgttgcaatggcagaagaatttatgtacaatggcaaacatgctttgattgtttatgatgacttatcaaaacaagcagtagcttatcgtgaactttctttgcttttgcgccgtccaccgggacgtgaagcctatcctggggatgtcttctatcttcatagccgtcttttggaacgttctgctaagctttctgatgagctgggcggcggctctattacagccttaccatttattgaaacgcaagcaggtgatatttcagcttatattgcaaccaacgttatttccatcactgacggtcaaattttccttcaagaaaatttgtttaactcaggaatccgtccagctatagatgccggatcttctgtatcacgtgttggtggttctgcccaaattaaggccatgaaaaaagttgcaggaactcttcgtctcgacttggcttcttatcgtgaacttgaagcctttacacagtttggttctgatcttgattcagcaacacaagctaagcttaatcgcggacgtcgcacagtagaagttcttaaacaaggccttcacaaacctttggcagttgaaaaacaagtcttgattctttatgctttgacacatggctttttagacagtgttcctgttgatgatattttgactttccaagatgatatgtttgattacattgactcacacaacgctgatatctttgaaacgattcgcacaacgaaagatcttccagaagaagcagtgctggacaaagccattcagactttcaaagatcagtcacaatttagttaataatgggagggatctagtatgacaggctctcttagtgaaatcaaggtaagaattacttcaacacaaaagacaggaaaaattaccagtgccatgaaaatggtgtcttctgctaaattggttaaatctgaacaagctgctaaagattttcaaatctatgcttcaaaaattcgtcaaatcacaacggatcttttacattctgatttgaggaagggttccagcaatccgatgcttatttcacgtccaattaagaagacggcttatattgtcattacttctgataaaggcttggttggtgcctacaattcaaccatcctaaaggccgttatggataccattaaagattatcatccaaagggtgatgattacaccattatttctattggtggaatgggatcggactttttcagagctcgtcatattccagtagcctttgaattacgtgggttggaagataatcccagttttgaagaagttaaccgtatcatttccaagtctgttgaaatgtacaaaaatgagctttttgatgaactttatgtctgttacagccatcatattaatagtttaaccagtcaggttcgtgttgaaaaaatgcttcctatctctgatttggatgcagatgaagctagtgaagataatgtcgctaacttcgaattagaacctagtcgagaagctattttggaacaactcttacctcaatatacagaaagtttgatttatggagcgattattgatgctaaaacagcagagcatgctgcaggtatgacagctatgcagactgcaacagataatgcagacaaggtcattgaagatttaacaaaactatataatcgtgtgcgtcaagctgcgattacacaagaaattacagagattgttgcgggtgccaatgccctagactaatctaatactttaaaaggagaaaaaaatgagcacaggcaaaattgctcaggtagttggtcctgttgttgatgttgcatttgcgacagatgataaacttcctgagattaataatgcattggtcgtttataaagatggcgacaagtctcaaagaattgttcttgaagttgcccttgaactcggtgatggactagttcgtaccattgctatggagtcaactgatggtttaacacgtgggcttgaagtctttgatacgggccgtgctatcagtgttccggttggaaaagaaacactaggtcgtgtctttaatgttcttggagatacgattgaccttgataagccttttgcagaagatgctgaacgtcagccaattcataaaaaggcaccatcatttgatgatctatcaacttcaactgagattttagaaacaggaattaaagttattgaccttcttgccccttatcttaaaggtggtaaagtcggcctttttggtggtgccggtgtcggaaagaccgttttgattcaggagttaattcataatattgctcaagagcatggcgggatttcggtatttactggtgttggtgaacggacacgtgaaggaaatgacctttattgggaaatgaaagaatctggtgttattgaaaagacagctatggtctttggtcagatgaatgaaccgcctggagcacggatgcgtgttgctcttactggtcttaccatcgctgaatacttccgtgatgtagaaggtcaggatgtgcttcttttcattgataacattttccgttttacccaagcaggttctgaagtttcagctcttcttggccgtatgccatcagccgttggttatcagccaaccttggcaactgaaatggggcaattacaagaacggattacatcgacgaaaaaaggttctgttacctcaattcaggccatctatgtgccagccgatgactatactgaccctgcgccagctacagcctttgctcacttagattcaaccactaaccttgaacgccgtctgacacaaatggggatttacccagcggtggatcctttagcttcaagttcacgtgctctctcgcctgaaatagttggtcaagagcactacgatgttgccacagaagtacagcatgtcttgcagcgttatcgtgagttacaagatattatagctattcttggtatggatgagttatctgatgaagaaaagactctggttggccgtgcgcgtcggattcagttcttcctttcacaaaatttcaatgttgcagaacaatttacaggacagccgggttcttatgttcctgttgctgaaactgtccgtggatttaaagaaattctcgaaggaaaatatgatgaacttccagaagatgctttccgaagtgttggagctattgaggatgttgttgaaaaagccaagaatatgggtgtttaaatgaggtgatcaaatggcagaaatgactgtacaaattgtaacaccagatggtttaaaatatgatcatcatgccaagttcattttggtcaaaacgccaaatggtgaattgggagttttggctaatcacgaaaatttaattgcaccccttgaagttcacgagatgaaaattaaacgtattgatgatgacagtcatgttgattgggttgcagttaatggtggcattattgaaattaaagacaatcttgtgaccattgttgcggattcggctgagcgtgaacgtgatatcgatctttctcgggcagaacgtgctaaaaaacgtgctgaaaaagcaattgaagaagctaaagagcaacatcgtattgatgaagttcaacgtgctcaggttgctttgcggcgtgctcttaaccgtataaatgtaggatctaaataagaaacaaaaagaggctggtacaaaaagtgctccagcttttttgttgtgcagaggttttaattaacacaatggttgatgggaattttcgcatcttaatttttaggcttaaacctttaactgtttaggaatcattgaagcttatctaatcccatgaacgccagacaatgtcgatacctatccactttgcgaaaactaagcgacaaaatcgacatcgccatttcatgacgttctatcgatttttatccgctctcttttttggtataatagacttatggaaattttacgaaatagtatcatgttgatgagtcattttatattcattgctattttttacaatcttctgattaatttatttgattggggaaaaattgttaaacgagcttctgagaatataggacgtcttaaattgtttttgttgtttattagcattgtcattggttatatggttagtacctttatctggtctgtcatttcgttaagtcaagatatcttttttgcgatttaatttattcgaatagtgtctttattgtggtataatgcaagaataaaatataataattggagaaattcgtggatagaataattattgaaggcggaaatacacaacttaaaggggaagtcgttattgaaggggctaaaaatgccgttcttccgctattggcagcggctattttaccgacagaagggcaaacgcttctgaagaatgtacctattttgtctgatgtttttaccatgaacaatgttgtacgtggtttaaatgttgcagtcgattttgatgaagaaaggaaccagatactggtagatgcaacaggtgatattttagatgtggctccttatgaatatgtcagtcaaatgcgagcatctatcgttgttttgggacctattttagcacgaaatagtcatgctaaggtttctatgcccggaggctgtacaattggcagtcgccccattgatttgcatttaaaaggcttagaagctatgggagcaaagattcaacagacaggtggtgatattacagccactgccgatcgtttaaagggtgctaacatttacatggattttccaagtgttggcgcgactcagaatcttatgatggctgctactttagctgatggaacaacgattatcgaaaatgcagcacgtgaaccagaaatcgttgacttggctaatcttctaaataagatgggtgccagagtcattggtgcaggaactgaaaccttgaccattataggtgttgataaaatgcacggtactgaccacagtgttgtccaagatcgtattgaagcaggaaccttcatggttgcagcggctatgaccaatggaaatgtcttggttaagaatgctgtgtgggaacacaatcgtcctcttatttctaaattaagagaaatgggcgtccaagtcactgaagaagaaagaggaattcgagtgatatctgatgtgaccaaactcagacctgtaacggttaaaaccatgccccatcccggttttccaacggatatgcaagcgcagtttacagcactgatggcagtcgttaagggtgaatcaacaatgatcgagacagtttttgagaatcgttttcaacatttagaagaaatgcggcggatggggctcacttcagaaattttacgcgatacagccatgattcatggtggcgaacaactgcaaggtgcccaagttatgtcaactgatttgcgagctagtgctgcccttatcttaacaggtatggtggctgatggtaaaacaactgttggtaagttaaatcatttagatcgtggttattatcaatttcacgaaaagctgactaagcttggtgcaacaattagccgtgttaatggagaataggaatgaatagtggttggaaatatgttcggaatcaattagcttttgttgtcctcattgctcttttatgtctcatttttctggcaatcggtctaatgattggttatagttttattggtggaggtagaaatcctttatctatcttatcctgggataaatggcagtcaatcattgataaatttactggaaagtaggattagcctacttttttaatggtattttagaggagtttctatgactagaaaaacgaacaagtctcagcgaaaacagcaaaaattatgcttatctctccttgctgctttgagcgtatttgtttgtacttatattgcaaccagtgatcatattgctgatagtaaccctataaagcaggctgcccaattattgacaggtaaaaacaaggatatactttcaaatggttcaatgagccatcaagcgactcccagtcaagaattagccaatactgttatgacggatgcagtaaaaaatgctttgggtagacaaattgaatggagtggtgcaggttctttcattattaatcataataaaactgaccttaacgctgatgttgctagccaaccgtatgctaataatcagaccaaaatcgttcaaggacagacagtaccaacagtagcaaatgctttgttaagtaaggctattcgtcagtaccgaaaccgccaagagacaggaaatggcaggacaaattggcagccagcaggctggcatcagctttatgatttgccgggtgactatgatcacgcggttgatcgtggacacttattggcttatgctttggttggtggtttgaaacgatttgatgcttcaacgagtaatcctcaaaatgtagcaacacaagcagcttgggctaatgaagccaatagttcaaactcaaggggacaaaattattatgaaacactgattagaaaagctttggatagtcataagcgtgttcgttatcgtgtgactcttatctatgatgacaacaatgatatcttagccagtggcagtcatctagaagccaaatcatcagatggcagtctagagttcaatgtctttattcctaatgttcaaagcggtttgacctttgattatgcaacaggacaagttaaggcaaattaatgttgctgtacttttaaaaataaaagtaaaaaaatcagtctggaattttgatatccagactgattttttagtccgttgcttgttcccactttttagcaagacggcgagaaaaacttgaaatgataaagttaatgataaaataagttactgcaacaatcccataaagagcaaagacttgatcagcttcaaaatattttcccatcaaaatttgactttttccgaataattcttgaagggcaataacagaataaagaaaagaagtatctttaataacagttacaaattgggaaatgatagctggcagcatttttctgatagcctgagggaaaatgatataaataaaaatctgagaattggttaatccttgagcaagtcctgcctcagtttgtccattatcaatagcatttaatccgcctcggataatttctgctagagctgcagaggtaaaaacagtgaaagcagtaataccagcaggagtggatttcatttgaaagacaagaaagacaatgaaaatccataaaaggttaggaacatttctgacgaactcaatataaatactagcaatccatcttagcggtttatttttaccattgcgcataacagctagaatcgttcccaaaatggtagatagtacaatggaaataaaagagatataaagtgttagccacaaaccttgaagtaaaaaattgagatttgtgggtgttaataatgctttcattagtcagcctccctttataaatgataagcttctttgttagcttcttctttacgtcgagcccaagttgcaagaggaaaacacatgatgaagtaaaggaaggcggcaccagcaaaagcagggatgtaattagttgtttcgtaggcccaagctttggccgtaaacatgatatccgcgcctgaaataatagcaactgttgatgtattttttatcaagttaaccacttggttagtcattggtggcaagatagttctgatggcctgcggcaagataattagactcatggtctcttgataggtaaatccttgagaaagagctgcttcggtttgtcctctaggcacagcttcaataccagagcgaatgacttctgcaatgtaagcaccgtggtaaataccaacacaaagtactgcagtaaagaaggctgagatcataacagcaccgtttgtcataatagctaacccgtaataaacaaagacgaattgtaccaataatggtgtattttgaaaaatctcaacataaacacgggctattcctttgagaagcttagttttagaggaactcatggcgccaaaaataacaccaagaattaaagaaagcagtaaagcgaagacggacatttcaagtgtataaaagaagccttttaaaaattgattgaaattggcaaaaaatgcagaccagcggctcagagcaaaagggccggaagtagcagtaaatagtagcataatatctcctttactcattatttatctggtttggctgattcaagattatgtttattataaatgctttcaagacttttatcagcagtccatttttttaataaataattaacatattttgttaagccagtatttgattttttagtggcaataccatattcttgcgtattaaagccagattttagcaatttagattgcttgctgacatagccagtgaggatggacttatcaacagaaaaagcgtcaatgcgtttagaatagagagaaatagcaagttcagggaagcttcccaattgaacatagttaaattttaagtggtgttttttagcataagcttcaagattaaccttagttgttgccccttgagaaacaccaatagtaagtccgtctagatcagaaatttttgaaatcttgcttgattgacgaaccaaaaaaccaatttggtcataataataaggtttagaaatactgtaagaagcttgacgttctggagtaatggtataggtagcaataactaggtcaacttggccgttgtccataagaggttcacgagtttgagtcgtaacgggaacaagttcaagttttaccccaatagatttggcgattttacgagcaatatcaatttccattccctcgtatttacccgtctcagcattgtaataaccgaaattaggaacatcttgcttgacaccgaccttaagcactccagcccttttaatttttttaacttgtggagaggttacattatcagcgtttactttggataaccctgaaaggcttgttgcaatcataatcagagcagccaaactgatgagaaattttttgatgttcattcgctttctcctttttggttgatattcactttttcactggtatgattgataattttgcttaagaactgttgagctcgtggatcttttggatgtttaaagaaaccatcaacatcagttgtatcttctagaatttctccatcagccataaaaatgatacgatcggcaacttcacgtgcaaatcccatttcgtgagtgacgacgaccatgttcatgccttctaaggctaaatttttcataacagctaaaacatccccaatggtttcagggtccagtgcagaagttggctcatcaaaaagcagtaacttaggattcatagctagtccgcgtgcaatagcgatacgctgtttttgtccgccagatagcatacccggataggaatctttgcgatcccacatgttaacataagtgagatatttttcagcaatagcatcggcctttttcttatccattcctaaaactttaattggagctaatgtcacgttttctagcactgttttgtgagggtagagattaaaatgttggaaaaccataccaacttcttttcgaagtgtgactaggtccttagttgaagcgttggtaacttcatgaccgttaacaatgagttcaccagagtcaatggattccagagcattcattgtgcgaataagtgtggacttcccagatcctgaaggaccaagtaaaacaacaacctgtcctttttcaatttctagatttatattacgaagtgcatggtagtccccatagtatttttccacatttttaaaggtaatgagtgccatagtcttctccttatttgacataaatttattgttagcttttctaacattatattgttatactatcataccttttctaagatgtcaaatattatcagaaaattcagtaagataactttctctaatagtttgaaataaaattgttggttttcatttgccattgattttgatataatcgtagagggttactttaagcagtaaagctttaagtaaataaaaatggttctaacataaagtttactctaagtgggcttgatataaaaatcagataaaaattaataaaatagcatgatttttaatctttcttacttatttcataaacttctattttaagaccataagcgaggtattcataatgaagaaaattctaatcgttgacgatgaaaaaccaatttctgatatcatcaagtttaacttggctaaggaaggttatgacacgattacagcctttgatgggcgtgaagcattaagtaaatatgaagaagaaaatcctgacttgattatattggacttaatgttaccagaactagatggtcttgaagtggctaaggaagttagaaaaaacagccatgttccaattattatgttatcagctaaagacagtgagtttgataaggttattggtcttgaaattggtgctgatgattatgtgactaaacctttttctaatcgtgaattactggcgcgtgtaaaagcgcatcttcgccgtactgaaaatattgaatccgcagtggctgaggaaaatgcttcaggtatacctgaaattattattggggacttgcaaatcttaccagatgcttttgttgctaaaaaacgtggaacagaggtagagttaactcaccgtgagtttgagctgttgcatcacttagcgacacacacaggtcaggtgatgacgcgtgaacatttacttgaaacggtttggggctatgattattttggagatgtccgtactgttgatgttactgttcgtcgtctgcgtgaaaaaattgaagatacacctagtcgtccagagtacattttgacgcgacgcggtgttggttattacatgaaatcatatgactaatgtgtttgaatcaagtcccttatttttacgaattttattagcagttttaatcattttactctttttttattttatttttctcaattacagagagtataaaaataataatcaagttaaacagttaaatgctaaagtacgttctttgattactggccattatactgacaaattaaaggttgaggataactctgacttgtcagaactagtgaataacgttaatgatttatcagaagttttccgtttaacgcatgaaaatttggcacaggagaaaaaccgtctgactagtattttatcttatatgacagatggtgttttggcaacagatcgccgcggaaagattaccgttattaacgatatggcgcaaaagcaactgaatgtaacgcgtgagcaggcattggagtgcaatattctggatattttggatgatgatagttatacttacaatgatttgattacaaaaacgccggaaattgttctgacgcggcgtgatgaatatgatgaatttatcactttacgcattcgttttgccttaaaccgccgtgaaagtggctttatttcaggactaattgctgtcttgcatgatgcgaccgaacaggaaaaagaagaacgtgaacgccgtctctttgtttctaatgtcagtcatgaactgcggacaccattaacctctgtaaagtcctatttagaagctttggacgatggtgccctgacagaatcagtggctcctagttttatcaaggtatcacttgatgagactaatcgcatgatgcgtatgattactgatttacttagcttatcacgtattgataatcagaccagtcatttagatgttgaattgacgaattttacagcttttatgaattatattctggatcgctttgatcaaattcaaagtcagcaatcaactaataaggtttacgaaattattagagattatcctgacaaatcagtttggattgaaattgataccgataaaatgactcaggtaattgataatattttaaataatgcaatcaaatattcacctgatggcggtaaggtgactgtaacgatgcagacaacagatacacaactcatcctttctatatccgaccaaggcttgggtattcctaagaaggatctccctcttatttttgaccgtttttatcgtgttgataaggcaagaagccgtgctcaaggtgggactggtttaggattagcaatcgccaaagaaattgtcaaacagcataaaggctttatttgggccaatagtgaggaaggcgaagggtcgacctttaccatcgttttaccttatgaaaacgataatgatgcaattgatgaatgggaagaagatgaagacgaatcatgacagaaacaggttttagatacagcattctggcttctggttcaagtggcaatagtttttatttggaaactcctcaaaagagaattttaattgacgcaggcctctcaggtaagaaaattagtcaattaatggcagaaatagaccgaaaagtagatgatgttgatgccattttagtaacacatgaacataaagatcatattcacggtgttggtgtactagctcggaaatatggtttggatgtctatgcgaatgcagcaacatggcaagctatggatggcatgattggtaaaattgatgtcagccaaaaacatatctttgatctggggaaaaccatcacttttggggatattgatattgaaagttttggtgtcagccatgatgctgctcaaccacagttttaccgcctgatgaaagacggcaagagttttgtcatattgacggatacaggttatgtcagtgatcgtatggcagatctgattgaaaatgctgatggttatctgattgagtccaatcatgatattgaaattttacgctcaggtacctacccttggagtttaaaacagcgtattttatccgataaaggacacctatcaaatgatgatggtgcagaaacaatggttcgaactttggggaataaaacaaaaaagatttatttgggacatctcagcaaagaaaacaatgtcaaagaattagcccatatgacgatgaagaatgctctcatgcaggcagatttggctgtagatcatgattttaagatttatgatacctcgccagatactgctttaccattagcaaaaatctagtggacagcttaaaaggaagaatgaaaaacaaagattactcggaaatggttgttctgggtgatttttgctataatagaaaggtctaaggataaaagaaaggatttatatgaaaacattagaaaaaaaactggcagaagactttaagatcgtcttttctgacaaggaattattggaaactgcctttactcatactagttatgctaatgagcatcgcctcctaaacatttcacataacgagcgcttggaatttttaggagacgctgttctgcagttaacgatttcacgttatctttttgacaaataccctcaaaaagctgaaggtgatttatcaaaaatgcgttcgatgattgttcgtgaagaaagtttggcgggtttttctagaaattgtcactttgaccgctatattaaattaggtaagggtgaagaaaaatctggcggtcgtcaaagagatactattttgggagatttatttgaagcttttttaggtgctcttttattggatgcaggtcttaaagctgttgaggcctttctcaatcaagttgtgattcctaaggttgaaaataataattatgaacgtgtgaccgattataaaacggcacttcaagaattattgcaagttgacggggatgttttgatcgattacgaggtcttaaaagaatcaggacccgcccatgcaaaatgctttgaagttgctgtttctatgaatcatgaaaaacttagtagcgggacaggcaaatcaaaaaaattagcagagcaagaggctgctaaaaatgcgcttgaaaaacttcaacgaggttcttaatgtttttaaaagaaattgaaatgcagggatttaaatcttttgctgataagaccaaggttgagttcgacagaggagtgacagccgttgttggaccaaatggttcaggaaagagtaatattacggagagtttacgctgggctttgggtgagtcaagtgccaagagcctgcgtggcggcaagatgccagacgtgatttttgcaggaactgaaaatcgaaagccactcaattacgctcaagtaacggttattttagataatagcgatgcctttatcaaagacgctcaagaggagattcgcattgaacgccatatttatcgtaatggggacagtgattatcttattgatggtaaaaaagtacgcctgcgcgatattcacgatttgtttatggatactggtttggggcgtgattccttttccattatttctcaaggacgtgtggaagagatttttaatagtaaaccagaagagcgtcgttcaatttttgaagaagcagccggtgtcttaaaatacaaaacacgtaaaaaagagacgcagtctaagctaacacagactcaggataatttggatcggctggatgatattatctatgaactggagacacagataaagcctttagaacgtcaggcaaaaacagccaaagaatttctggttttggaaacagagcgcaaggagaaacagttagacttgctggtctaccaaattctccatcataaggaagccttagtgaaaaaccaagctgagcttgaaaaagttaaacaaaatttagcagcctattatcaagaacgtgatctattagaaactaagaatcagactctaaaagaaaaaaggcaccagctttctcgtcaaatggatcaaaagcaggctgatctccttgaaatgacacgtctcattagtgattatgagcgtcagattgaacgcattcatttagaggttagtcaaaagacagaaaagaagcaatctactcaaaaaagcctagaacaattgtcagagcaaaaggcttctcttaaagcagaattagctcaaaaagaagttgacttagaacaattagaagaggatcttaaacaaaaaaatcaagaaattaaaaatgtcgaaacggaattgtcacgttttgcaacagatcctgatcatattattgaaagtttacgagaagattttgttagactcatgcaaaaagaggctgatacttctaaccaattggctgttttaaaagcagaaatggatagtcgaaagcaagaatccgaaagtaaaagagcagaaatcaaacaagtacaagcagacttagagaaagcaaaagatcgagaacaaagggaatccgcaaactttgaaactgctaaaaccaaagttcaagaattgctaaaggactatcaaaaaacagcacagcttgttcagaatttagaagctgcttatgctgagcagcaagaggctatgtttcaattgttggatgatgtcaaagacaagaaagcacgccaaagcagtctgaagtccatcttaaaaagccatagtaatttctatgcaggtgttaggtctgttcttcagcaggctgataaaattaaaggtattgttggcgcggttagtgaacatttaacttttgataaaaaatatcaaaccgcacttgagattgccttaggtgccagcagtcaaaatattattgtcgaagatgaagcggcggccaaacgatctattgattttttaaagaagaaccgtcaaggtcgagcaacttttcttcctttaacaaccattaaaccccgtcgtttatctgagtcaaatcaaagcctattaacttccagccagggctttctcggtttagcacgtgatttggtaagttttgagcctcgtttgcaaacaatttttggcaatttactgggtgtcacagcgatttttgatacggttggtcatgccaatcaggcagctcgccagttacgttatcaagtgcgtcttgtaacattagatggaacagaaatccgtcccggaggatccttttcaggaggtactagtcgtcaaaataatacaacttttatcaagccagaactggatcatttgacacaagagctagcgcttttagaagaaaaacaagttgagcaggaaagaacagttgaaaagaccaagcaggacttggaagtgaaaaaagcagatcttttagaattaagggaaaaaggaaatcaagcccgattggctgagcaaaaggctgagatggagtatcaacaatcagagtctcatttacaagagctggtcttgctttatacccaattaaaacaaacaaatcaggcggatcttaatcgagacttagaaaaagaccaagcacttttacaagaaaagctgtacaaaattgctgatgacaaggaaaagctcaatcaagagattgctcaaatcaaggaagataaggatagtattcagcaaaagacagctgctttaagtcaacgactctcttctttgcaactttctgagcgcgatttggctaatacacagaaatttgaaagaacgaatttaaaacgtttggcagaagaattagctgaattggagcaaaatgaagctggtatgatgcaacttttagatagccaagaagaggatttggatgaaaaacgtttaccatcactcaaacagcaattagcaaacgctcaggctagaaaaacagagagtgaccaagaacttgtccgctaccgttttgaactggaagactgtgaagcacagctagaagaggttgagaccaatctcctaaaaactaatcaaaagaatgaagagttcattcgtcagcaaacgcaattagaagcaaaaagggatcatttatccaatcaattgcgccgttttgccaataacttggctgaagattatcaactaagcttagatgatgctaaacaagaggcaggaccgattgaaaatctagaagctgctcaagctcatttaagccaattggaaaagcaaattaagggattgggaccggtcaaccttgacgcaatcggtcagtacgatgaagtgtctgagcgtttgcatttcttaaatagtcaaaaagatgaccttgttcacgctaaggaacttctcctgaatactattcatgatatggatgatgaggtcaaggcacgctttaagacgacttttgaagctattcgtgacagttttaagacgacctttacgcagatgtttggcggaggaagtgctgacttgcttttgacagaaggagatctcttgatgaccggtgttgaaatttcagtgcagccgcctggcaagaagattcaatctctcaatcttatgtctggtggtgaaaaggcactgtctgctttggcattgttatttgccatcattcgtgttaaaaccattccctttgttattttggatgaggttgaggctgctcttgacgaggccaatgtcaagcgttttggtgattatctgaatcgttttgataagtccagccagtttattgtggtcactcaccgtaaaggcaccatgtctgctgcagatagtatatatggggttaccatgcaggaatcaggtgtctctaagattatctctgttaagctaaaagaagtcgaaaagatatcttaaaaaggcttggaagtgcttagtttgaaaaaactgtaaggacacaatcaatctttgacggcaatagtacttaaagtgactctcaacaaggaaacaaggcggtaacgacaaaatcatttctgtaaattgcaatggaatctcgttccccatagaatcttttattcagcctattgagaaattttgtgaaatctgttaaaatggtaacaattgaataaaagtctatgagattagtagctttatggaaatttgacagggaatgcggggcgtgactggaaacccgctggatgaaagtttagtgaattcactcagaaagaaagacttaataattaaggtctagtcatactagataaaaacggatggtaccgcgtgtcaacgctccgcttaaggagttttggcacgttttttgtttttaacaaggtccttaaataggaaaggaaatcgcatggatttacaagcacaattagaagagctgagaaaatcaactcaagcaacattaaaggaaatgagcggcaatcacagcaaagaattacaagatttgcgtgttaaggttttgggtaagaaaggttccttgacagaacttttaaaaggtctaaaggacttaccaaatgagttgcgtcctgttgttggaaaacaagtcaatgaagtccgtgatgtcttaacaaaggcttttgaagaacaagctaaaatcgttgaagccgccaaaattcaagcgcaattagaatcagaaacattagatgtcactcttccgggacgccaaatacatctaggcaatcgccatgttctcagtcagataagtgaagaaattgaagatatattcctaggaatgggttttcaagtggttgatggctatgaagttgaacaagactattacaatttcgaacgcatgaatttgcccaaagatcacccagcacgtgatatgcaggacacgttttatatttctgaagacattttgcttcggacacataccagtcctgtgcaggcacgtactttagataaacatgatttttctaaaggaccgcttaagatgatttcacccgggcgcgtttttcgccgcgatacagatgatgcgacgcattcccatcaattccatcaaattgaaggcttggttgttggtaaaaacatttctatgggtgacctcaaaggaacactggaaatgattagtaaaaaaatgtttggtgaagatcgtaagattcgtctgcgtccttcttatttcccatttacggagccttctgttgaagtcgatgtttcgtgtttcaaatgcggcggcaaaggctgtaatgtttgtaagaaaacaggttggattgaaattcttggtgccggtatggttcatccaagtgttcttgagatgtccggcgttgactctgaagaatattctggttttgcctttggcttaggccaagaacgtatggctatgctgcgctatggaatcaatgatattcgaggtttctaccaaggtgacagccgttttacagaacaattcaattaaatctataaggttgtagagctttttgcaagctaattgctctggctcagccatccacaagttaaaggagtgaaaatgtcacaggttgaaattagaaaagtcaatcaagatgagctttctttgcttcagaaaattgctattcagacttttcgtgaaacctttgcttttgataatacagcagagcagctgcaaaacttttttgacgaagcttatactttgtccgctttaaaattagaattagctgataaagaatcagaaacctattttattttgatgtccggtaaagcagcgggatttttgaaagtgaactggggcagctctcaaaccgagcaggtactagaagatgcatttgaaattcaacgtctttatattttgaaagcttatcaaggtttaggtttaggaaaacagctttttgaatttgctttagaacgtgcgcaaatatcaggcttatcatgggtttggctgggcgtttgggaaaagaatgttaaggcccagttattgtatgctaaatatggatttgaacaattttctaagcattctttttttgttggtaacaaagtggatacggattggttgcttaaaaagtctttaagttagggaaaggaaatacatgttagtaagttataaatggttgaaagaattagttgatattgatgtacctagtcacgaattggctgaaaaaatgtcaacaacaggtattgaagttgaaggggtagacgttccagcagaaggactgtcaaaattagtcgtcggtcatgtcctttcttgtgaagatgttccagaaacgcatcttcatctttgtcaggtggatactggcgaggaagaatctcgtcaaatcgtttgtggagcaccaaatattatagctggcatcaaagtaattgttgctcttccgggagctcgtattgcagataattataagattaaaaaagggaaaatccgcggtatggaatctctgggtatgatttgctctctgcaggagcttggtttgccggacagcattattcctaaggagtattcagatggcattcaaattttgcctgaagatgctgtgccgggtgaaagtatcttcccttatttggacttagatgatgaaatcattgagctgtctatcacacctaaccgtgcagatgctttatccatgcgcggtgtggctcatgaagtagcagcgatttatgataaatctgttcattttgaagataaagtcttgactgagagtgataagaaagcagctgaccttatcaaggtagccatcgcttctgacaaggttttgacttacaaagcgcgtgtggttgaaaatgtaaccattaaaccaagtccacagtggctgcaaaatctgcttatgaatgctggcattcggcctattaataatgtggttgatgtgaccaattatgttcttctttattttggacagcctatgcatgcttttgatttagataagtttgaaggcaaggatattcttgcacgtcaggcaaaagctggtgagaaattagtaacacttgatggtgaagcgcgtgatttgattgaagaggatcttgtcattactgtagcagataaaccagtggcacttgcaggtgttatgggtggtgctgcaactgaaattgatgcctcttctaaaaatgttgtccttgaagcagccgtctttgatggaaagtcaattcgtaaaacaagcagccgtcttaatctgcgttccgaaagttcttcacgttttgaaaaaggtgttaattacgctgatgttgttaaggcacttgattttgctgcagcaatgctgacggaattggcagatggaacagttctcgctggtcaggtcagtgcaggagcagttccgacagatgatattcaagtatctactagtctggattatgtcaatgttcgcttaggtacagacttagttttctcagatattgaaagtgtttttgctcgccttggttttggtctttctggcaatgacgaaaaattcacggtttctgtaccgcgtcgccgttgggatattagcattcaggcggatttgatcgaagaaatcgctcgtatttatggttatgataaattaccgacaacactgcctgaagcagcaggaacagttggtgaattgaccaagacacagaaattacgtcgtaaaataagaagtttggctgaaggcagtggtctttcagaaattatttcctatgccctgacaacgcctgaaaaggcagttgcttttacgccaaatcctagcaaggtgacagaactgatgtggccaatgaccgttgagcgttcggcactgcgtcaaaatattgtctctggaatgctagataccattgcctataatgtagcacgtaagagcaacaatctagccctatatgaaattggcaaagtatttgagcaaacagcggatcccaaaaaagatttgcctaaggaaatagatacttttgcctttgctctgacaggtttagtaactgaaaaagactttcagacagcagcaaccccagttgatttcttctatgctaaaggtgttctggaagctattcttgctaaacttgaaatcactgttcaatttgttgcgactaaagaaatggctaatatgcatcccggacgcacagctttaattgaacgtgatggtcaagttatcggttatcttggtcaagttcatccgcagactgctaaactgtacgatattccagaaacttatgtagcagaattgaatcttaatgcactggaagcagctcttaaatcggatttagtctttgaagatatcactaaattcccagctgtttcgcgcgatattgccctgcttctctcagaaaaagtgagtcaccaagatattttggatgctattgcaaccagcggtgtgaaacgccttaccaaagtaaaactctttgacgtttatgctggtgaaaaattgggacaaggtaagaaatcaatggcctacagcctgactttccaaaatcctaatgataatctcacagatgaagaagttgccaaatacatggaaaaaatcaccaaagccctaaccgaaaaaattggtgctgaagtgagataacgaaaaaatctaccttcaaaggtagatttttttggtatgtaagctagtgagcctacccaccgccgataatgataattgtttctaataccactatcaaagtcataaaaattttatttctcatgtttttctcctcactcacttttcttatatgttataataaattgcaattaactgaatataaatcccatatagacaattgaggtactattgatgactgaatatggaaaaatatttaaaaaatttagagaatcacgcggtctaaaaatgaaggaagtagctggttcaaatttatcaacttcacatctttcaagatttgaaaatggagaatctgagctgacaataagtaaacttatgacagcactgtacgaaataaatatgcctattgaagaatttatgtatgctgccaatgatttccatcaggatgaattaaatgagctccttaaagatgtgagggagtgtgttaataataaagatgttgaacgattaaaagcggtattgattaagcaacaagagaatttaaaagaaggtcgaatttttcaccatttgaatgttattctagtaaaaataaggttgcaagatttatccggtgaaacttattatagtaaagcagacctagattacttaacaaattacttatttaaagttgaatactggggtttctatgagctgttactttttacgaatactattgatgtttttaaacatgaaacttttatggttctctctagagagatgatgagacggtcagatttttataaagaaatacctcgaaatcgacgtcttatttcacgtatggctctgaattcttttataacttgcattgaaagagataaactgattgatgcactgtattttgaaaaacaattaagcatctgtcattttgatgaaacagaaatttatgaacgcttggtctttcattatgctcaaaatctatttgcctataaaaaatataagacgacatttgctattattgaaatgaagaaatcagtagcagcaatgaaattggcagggagtttgcatattgctgaaacctatgaaaaccatcttcaaaaaattttagaaggataatatgaaattgtgtatatgggataaaaatctctctttttggatttgatttataataattctatcaaatcaaggaggtaaatactatgttgactaaaaaagagtttagtgttcctaaaacaactaaggtaaactgttggggtaagcactagtaaaacaaggtctgtaggtcattgcatggcttacagattttttaggaggtattttaatgagagattattcaccatatccgttattggttgatgtttgtgtaacaaatcgttgtaatttaagttgttcatattgttcagcagaagcaggcccttttgccagtaaaaaaggagagatgtctgttgagaagctggattctattttccgtgaattaaatttaatgggagttccgcgagtaggtgttactggaggtgaaccgtttattagagatgatatattagacatcttaaaggcttttgataaatatcattttgctaaagttttaaatactaatggtaacctcattacagattctgtagctaaggaattatctaaactgcatttggatagaatttgtgtgactgtggatggaagttgctctaaagttcatgatagccaaagaggtaaaggaagctttaaaaaggcaatagagggtattaaaaatttacaaaggtataatcttcctgtttctacactttttacattaggaaggcacaatgtagatgatttgattaacactattaggttaaacgatatgcttagaattaaatatatgtctgtaatgattatttgcccaacaggtagagctaataatggaagcattctagcagataagaaacattggtatcctgtatttttagatttaacagagagattgtctcgtggagaatttaaagtgaagtttaaaatagttcctccaaatgaaagtgatgtcttttggacacattatttcccactagctttttacaaccgattagatttacttgaaagtgtatggcatcaaagcctgaactttaatagtaacaagaaaagagaaatatcttgccaagctggagtaagagcttgttctatcaaccataaaggtgatgtttatggttgtgatttgatgaacggcattgatgaacttgtagcaggtaatgtaaaagaaaaatctttttatgaaatttggcataattcttctatatttcataaattgagaaatattacatttgacgatatttcggggaaatgtgctggttgccccttaccttggtgtggtggtggatgtagatgcagtgcactggagttagatggaactttgcttggatctgatttagcatgtttttatgatgaagaggaaagcgtattggtatgaaaaatcattttacaataaaagggaagagagattttgttgttgataaaattgacgatgagtttataggatatgatagattagatctagagtattattcttttgatgatataggtgctgaaattttatattgtatttctaaaaacttttctttggacaaaatcattgaggtcattcaagaagagtatgatgtgacttatgacgattgtaagaaagctattgtccattttttagaggagacacctatattacatattatttatgcaaatcttattaaatcagacatttatttatacctaaaaccatttcgggaggcattatgagttattctaaagaggtgaaccgttatgtttttcctctcgttgccacaaaccttgttcaagttttgattggtcaaatttctcttcattttgctgtcgataattctaatgctgccttgtctggcatttctgttatccagaattttctttttgcatttggaggtattcttggagcctttagtttgtcgtttaatattagaggtgccaaggctttttataataaagaataccaacgatttaaaaatcttttaaaatcatccctgctaattgatattggaattggactgtcattcattcttttttgtctgggattgagcagaccttttttgaaagttttttatggttttgatggtcaattattggaactatcgactacctattttaagatcatgtctccttatattttattgaccttattaatctttcttttttcaaatcttttgaaaattgagaagaaaacaaagcccattttttggattggaaccctaagttccgtgctagatgtcttgttaaactattacttagttcctcttttgggaattcgtggagctgctatttcgtctattttatcgctgctagtcattgttttagggtatttcatttttgtaaaatctcttgtttttcaagcgcttcaagaggcttcgacaagtaagttagagcttatccgttttggaattcctttatccatacaagaaatactggagagtgttttatttatcatggctttcgacgctttcatgggaagacaagggctacgcattttgtccatctatgcggtagtcagtcaattatttgcaattgtgagaacacctgcctttatgtatgcgggttcaatagcaatctttttgcctgaagctaggaaaaaagaagacgaaaaagcattgattgcaactatttttagaaatagctacgctgttatatttatatttgcttgtttagtaacagtattttcaaatccttttgctcattttttgtctgatgaagttattgataatgtgctgccttttactttgtacacggttgtggtcatgggagcaacacctctatatgaaagctctaagatgcttttgcaaagcaatgatgacgaacaatgggttttaaaaataacaagcattgtcaatatattaagtatccttatcttattagttctccagttaatgggcaagcaaacctatcaatctctgtatggcatttatggtttgagtttaatagtgcttagtattcttttcataaaaagaaatagtgagaagagagtatcatcacgtaaaatgacaatgtaagacttgtagggagtaatacaagtcttttttagaactttaatgaataaaagttttttgacagtttacactagtttcacctaaaaaatattatcgatttttcaaacgaaacgtcgcagtaatctttggtggctacattaggaggtgatctaaggccttgaaaatccctttgaagattgacaaatcagttaatcaatcttcttctgcctacggtggtacctatagttcttagtgaccttacggtcgctttcgataagctaatgctttaggcaataagtaggaaatctatgaatatgggttcttaatatctcaaagtaaaactctttgacgtttatgctggtgaaaaattgggacaaggtaagaaatcaatggcctacagcctgactttccaaaatcctaatgataatctcacagatgaagaagttgccaaatacatggaaaaaatcaccaaagccctaaccgaaaaaattggtgcagaagtgaggtaaaaattgacagctgataagcttatagccgtctgtttcttatttttaaacagataacttagcaaggacagtgcccatcaatgatgtttgctgttagttcaatatgaaaagaaaattaatttctgtaaacgtcgttcgtcaagcctataaaagacctgtgtttgtgaaaacaatttcccgttttaaagggatgatagtcatttagtttatcctttatgactttgttagcgcgtcttaccgtacgtttttgtgactaactttgtcagtttaattatcacccttcaaccctcccagttgttaaaactgtctgcggcttgctgccttgtcttacaatcaaaccaaaagactagaataaggagaaaggttatgacacatgttgtatctgaaatttttaaagatggcccggtagacaggtttggtttacgaggggatcctgttttttggaactatttagaaaagcattttcaaaaggtagctatgccatattccgaaagaaaattagaagaggatataagaacgatctatcaagacttaactggaaaagaatttagaatgggtgagatggctcttgttaaagactttataagtgaatccggcggcatgtcatcaggatggcttagtgatgatttttggcttaaatcagctataccgcttctgaaaaaacgattggcaaaatggaatgaaactttataaagactgcagtttattgattatgaagaatgataaatcaagcaatggtgtcataaaagacaaacgggatggcttaacattcttttgaaaacaatttgacattttcaaagaaaagtttaaaatggaaaacagtctgaagaattgaggtaatgaagaactttgcggaaagaaaaaaatatgttgatattaggttgggtagcgacttttatgtctataatgatgtatgtgtcttatatccctcagattatgaataatttagcaggaaataagggggattttatccaaccgtcagtggctgcacttaactgcacactgtgggtaatttatggtctttgtaaagaaaagcgagaccttcctttagctgccgccaatatgccaggcattgtttttggcttgattgcagcgattacggcattagtttagctttataaaagcatttatttcataaaggttgtgaattgagtctgtgaaatagagatttctgtggaacggctctttttttttctgtcatttatcaaccttttcctgagatgatacctacttaatcacaatcaaatagacgaggaaatgtgtcaaagttaatgagggctaagcaagaaaagctgttagcgacggtctgtctagccaccttgctagctttctttctcagtgttattgattgctcgaacgtgtatcgcaaggtttcaagaaagttcactgacgctggattttctacgaattttggataaaagtgttctaactttttattgtgtagtggttttagtttaacgcagtgataaattggaattttcgcgtcttgttttttaggctcaaccctttaaagttcggtgttctgccggagcttatctaatctattttaaggaaagcaagacgacaaaattgaatcgagctttcattacgattggccgaactttttatacgtaattttatatatttacactattttgtgaataatgcgtagcaatcatgggagtctgtctcactttctaaagatcttactagttcgtcggcgaaatgaaattagaagataggtttatccttcaatttggtataataagaagaaaataaaaaagtaagtaggttaagtaatggacgagtttaatcaagtagaacgatttctttatctctatacagaattatataaaggaaatacaattagtaagcaagtttatctagataagtttggtgtatctgatgctagttttaataaagatattcgaaaattaaaagatgctgccagacatctaaatttagactttgatatcaaaataaacaaaaaagagtcatattattatttggattatacatcagaaactggtggaaatttaagtgatatagaggcttatacattgtctaaaattcttttagaaagtagggcattaagtaagaaaaaaacaaaaaatattattaagaaacttattaatcgtacagtaaatgaagactatcgtacaatcttagacaaacaaactgaaaatgaattatcattttataagcaactaaattattttaatgatgaaaatcatgatcaaaattatttaagtaatctaggcaaactttctcaagctgttgaggatactttgaagacggaaattcctataaaaatcgagtattctagtaaaggagaaactaaaagtgctttaattctgccttttgctattctttttcatgagtattatttttatatcacatcttataaatttgaaaatgaggaatgggttagccgtacttatcgattagatcgaattgagtcaataagcaatgctgatgggaaagaaattgttaaagcacaggcattttttcataagtatccatctccttctcttattcgcgatcaggttattatgatgttctctggggaaccttatttgattcggctaaaaatagtagataagactattacggaatatctaaaagatgctttacctactttacaagttattgatgaagaagaagctatctatgaaataagaaccttaggtgtagaaggtattcagctttttttaagacgttatggaagtcaagtagaatttgtaagtatgacagaacttaatacaggcgataatgagggctaagaactattttaagttcttagcccttttagattaaaatgtaagagttttacaatataggactataaaaattggtaagttagtcaataaagtgtaaatttttccaaatatattgttatatttcatattttattatatattgtaatcacagagtaagaatccgagttaatgtttgtgaaaggaaagttgtttatggataagaaagtactaaggtataatttttgggcgaaaaagcgggaagaaaaaggacaatttctttggcttcctctcatgcagcatttagaggatacaaaaaatgtagctggtctactgtgggaacattggctgggagaagggcaaaaggctctaattatcgcctccttaaagacgggtaagaaagatgagaaaacagccaaacaattagcccagtttttggctgccgtccatgatattggtaaggctactccagttttccaaagtaagaaaggttatgcaaattctaaggatttggatctggaattgttggaaaaattggaacgggctggttttgaagggatttcttcgattacacttgctaatcctgagaaatcccctcatgctttagctggacaatatattctgcattacaataaagtcaaagaagatattgccacaatcgttggaggacatcatggtaagcctgttgatgatagggctacatataaaaatcagcggtcacaggagtcaaattattatcagtcaggaaaatctggaaataccatttatcaaaaatgggagcgagcgcaagaagagattttaaattgggcattagaagttagcggttttaaatctgtggacgagcttccgacaattaaacagtctgcccaagtcattttgtctggcctgctcattatggctgactggattgccagcaatgaagattacttccctttgatttccatagatgagcgtgaagtggaaaataaagccgaccgattgtcgggctttgaaaaatggaaacgcagcagtttgtgggtatcaagaaatacctgggattttgaaggcctttatcaggcacgattcgattttgaacctagggatgttcaagctgtactatcaaaaacgatagctgatacagaacaacctggcatctttattttagaagctccaatggggataggaaaaacggaggcagctctggttgcaacagagcaactggctgaaaaaactgatcgaaatggtatctttttcggactgccaactcaggcgacttctaatggcatttttccgaggattgaaaaatggctagaaagtataaaagaggatttggatgacaatatttctattcagttagtccatgggaaagcagccttgaacgctgatttttctgagctgcctaaaggaatcagcatcaatattgatgattttgaaaatggcagtgtaattgttaatgaatggttttctggaaggaagactgcagtgctggatgattttgttgtggggactgtggatcaattcctgatgcttgcacttaaacaaaaacatttggccttgaggcatttagggttcagtaagaaggttgtagtaattgatgaagtgcatgcctatgatgcatacatgaatcagtatttactggaggccctgagatggatgggtgcctatggtgttcctgttatcatcctttcagctaccttaccggctgagagaagggaaaaactgctaaaaagttatatgtttggaatgggaaaacgttttgaagagaaagaaaaggaacagctatctaaacagttaaaaacagaagcttatccattgataacctataataatggttttgacatttgtcagataacagagtttaaaaagggtgaaaataaaaaaatacttctttcccagctggaggaagaggatttattagacaccgtaaaagggctgttgtctgacggaggcgtggcaggtattattgtcaatacagttaagcgagctcaaaaaatagcaaaagtatttgcagatagtctgggtgaagatatggttgaaatctttcattcgggttttatagcaacagaaagggttcggaaggaacaagaacttttgaagatgattggaaaagatgctaacagaccttatcgtaaaatcattattggaacgcaagtaattgagcagtcgctggatatcgactttgatgtcatgattagcgatttggctcctatggatctgttgattcagcggatggggagattgcatcgtcataagatagatcgtccacagaagcatgtttttccaaaattttatgtgataggaatgaatgttgatttgaaatttgaggaaggctcttcctttgtttatggcgattatttattagcaagaacccagtattatttgccggattcgattaatctgccagaagatatttcaattttagttcaaaaagtttatgatgagaaattagagcttgattatccaactgaacttttggataaaaaatatcataatgcgaaaagtgaacatgagactaaaatcgggaataaagaaagtaaagctagagactatagaattgcagatccagttttaagggaaacgagaagccgcaaggaaaatctcataggctggctagaaaatagtcatcctgatgacagtgatgaaagggcttatgctcaggtgcgtgatattgaagacattgttgaagtcattgcattgaaaaaggttggcgatggttatgctttgtttggcgaaggagaagatctttctgaattaattaccgatttcaatatcgctaaaaaagttgcccaaaataccttgagactgcctatagctttaactaaatcctataatgttgacgacacgattaaggagttggaaatgtacagtaggatgaacttaaataattggcaagattcctcttggcttaagggagctttgggaattatatttgatgaaaataatgaatttctcatcagaggttataaacttgtatatgatgagaaatatggcgtaagaatggaggaaatcgaaaatcatgagtagatttaatttattggatgaaccttggatttcagtagttttcgatgagaaaggttcaactaaggaagtgtccttgcttgatttctttcaaaatgcccatcattacaaggatttagctggagatacaaaaactcaagattttgctgttttgagagtgcttttagctgtcctacacacagtattttcaagatttgatgcaaatggcaatgtttatggatatcttgaaattgatgaaaaatatagacagatagaagaaattgaagaagatgaccttgaggagtatgaagatgacctttacgaaacttggctgactctttggcaaaacaggcaatttccagatattattgaagaatatttgaaaaaatggcgagacagattttacctttttgatgaagaatatccgttttttcaagtgagaagagaagatatctctgaagataaaataaatcaaaaaagcgcaacttctatttttggaaggaatgttaataaaacgatttcggaaagtaataataaaataactctattttcccctagagataatagaaataaagacatattatctgcatcagaggtggcaagatggttgcttacatttcaaggttatacaggtgtgtttgataagactacttttaaaggtgggaaaggctccccatcgaaaggatggatttatgatttgggaggcgtgtttgtaaaggggagcaatctatttactacgttgttacttaactttattttgccatatcaagaaagagataatcttataaatattcaaagcccaagctgggagtttgatagtaatgaacttatctcaatgtaccttgcaggaaaagagataaataatattgctggcttatacacagtgtggagcagaggaatatatatagactctaatcctgatttgagtttaccgttctcatttgaaattgtaaaactacctgatattaatcatcaagataactttttagaacctatgaccttatggatatataatcagttaggaaataataagggacactatacacctaaaaaacatgtaagtaaccagtctttgtggcgctcattcggtttgttggtaaatggtcagaataatcaacgaaggcctggtattatagattggcttgaggtagagtgcatccgagatgtaattggaattattccgattactatttgttcagttagtatgaaagatgatggtaatacaagttctaggatgccaaccgatgaaataattgacaccttttcgattaacgaatttgtactgactgattttcaggaaaatggatggacgactcgaattaataatattgttgaggaaactaaaacagtgatctcggtgatttacaaggactatgtggacgatattaggaaaattagaaatattaaatcaggcacatttatcacacaaaagctggaagaattatacttcaaaatagaccagcctttcagacagtggctttctggcattcattatggggatgaaaaagatgaaaaagtttttaaatggcgaggagttctaaaaaaacttgttcatcaagaagcaaaaatacttttacaagacggtggtcctagagattatattggcattgtcgataaggataatgaaactgtaaaaaatatagtcactgcttatgaaagcttcaactatagactgaataaaaatttgaaggagaagaaatgatgtcagaagaatcttatgtaaggatgtattttgttacaaagcaaatacttataaagttgaacaagcaacaaaatacttcagctggcaaggctatgttggcaagattgagacattctgtaggaaagccaattagcgaagcaaaagaagtttggccaattctatttgagaatgtacctgaaaattttttaagtcagtatgataatgccagctacgaagaaatagctattctaacggctatccagctatacgctttataccagcaaggaatgtcacacaatgtttttgatgatagtgctaagaagtttcaaaatattggttattcattgaagagtattcgcacaagagttgatacagttgcagtggatcgaaggtttaataccatgattactgctacaacgtttgaagaacttgttcatcatcttagacagttgattactttgctaaaatcaaagacacccgaaacaaaaatagactttgctcgtcttgcgacagatttgtattgtttcttgagagattatcaggaaacagtacgcctgaaatgggcacggcaatactacaaacattcatctgaggaggaagcagaaaatgacaactaatcaagaaaaactatttttagatattcacgttatccaaactttaccaccatcaaatattaaccgtgatgatacaggtggccccaaaacagctcaatacggtggggttaggcgagctcgcgttagctctcaatcttggaagagagctatgcgggaatatttagtgaactctcttaaactggaaaatacaagtgcaagaaccgtgaagattgtagaatacatcgctaaacaaattcagctcattgatcagtcaattgaaattgatacagccaaaaaacttgttaaagaaatgttagagcgggtcgtgaagaagaaaagtggaaaagatgaaaaaatatttgttattgacaatgaatataaattgtctgcgctattttttatctcgaaatttcaatctattaaattagcagaattagcattaaatcctgaatttgttgaaatttgtaataaatttgatgctttatctggtaaagtgaaagaggataaagagtataagaagagcaaggaatataaggaaattgatgctgcatataagattcaaatgaagaaaataaaagaaattcttaatgagctcctttcaatagatatcgctttctttggcagaatgctagcctcagatccatcattaaatgaagatgcctcttcacaagttgctcatgcgatttcaacacatgctatacagactgaatttgatttctttacagccattgatgatttggctcctgaagataatgcaggagcaggtatgcttggaactgttgaatttaattcatctacgctttaccgttatgcaaatatcgcaattcatgaattggaatctcaattggatgatggggaaagtgctgtcaatgccttaaaactttttgtcgaagcatttgcaaaatcattaccaactgggaaagtgaacacgtttgctaaccagacattgccacaagctctagttgtgactgtgcgaaatgatcgtcctgttaatcttgtcagtgcctttgaagagcctgtaaaatcttctaacggatatgtgacaaagtctattgagaagctttcaaaagagtttgtcaaagttgaaaaaatggtaaagaaaccagtcctatctttttatgtgagcttggaagaagtagaagcgttgactaaggttggtactgaaaagaattccattacagaattggttgaagatttttcacaagaactgtctgatttaattcaaaataggtgaataaaatgaaaacgattttgttgaaatttgctggtcccctgcaatcatgggggaccagctcacactttgaaacgagacatacagacttttatccatccaaaagtgcagtgattggggtgattgcggccagtcttggatatagaaggaacgaggacgaaaaaatcaggaaattaaatgaattggattttgctgtccgggttgatcaacaaggaaatttattaagagattggcataacgcaaaaagcgataaaagaaaagatccatacacaaccaatcgttactatttggaggatgctgtttttgtcgtggcgatttcacatcagaattatgcctttatacaaatgattgaagatggtctgcggtctccgtattttcagccttttatggggaggagagcttgtcctctgcctgtagattttatcgttcaagtaacaaatgactctgctcttgatagtttgaaacaactagattggcaagctgctacttggtatatgaaaaggcagtcaacagatgatcggatctcgttagaaatttatacggatagttatttgaccggaaaagaatcttaccaattaagacaggataaagttctctcattttcacaaaaagaaagaaaatttggttttagatatgagtcacgagttcgggttgaagttttgaatccattgtggcaagagcaaagtagcactgaacatgatatttttaatagtataggagactgatgattatgtatatttctagagtagaaatagatatgaacaatagacgaaaggtaaagaatctaacgcatgtgggagcatttcatgattgggttgagaggagttttcctaacgaaatagagaagcaaattcgcacaagaaaattatggcgtatagatactttacaagggaaaaactatctcattattatcagttcggaaaaacctgatttgttattgcttgaaaaatatggagtggaaggaagtgctcagacaaagttatatgacaattttttaaatactttaaaaaaaggaaatcgaatgaagtttcgtgttgctttaaaccccgtcatttctttaccatcatcagataacaaaaaaagaggaattgttaagcctcatgttaccagtgaatatcagatgaaatatttaaaggataggtctgaaaaaaatggttttctattagatgaagctgaatttttaattgttgaaagaggttatgaagtatttaaaaaatcaaatcctaaacctattagactgataaagactgtttacgaaggtactttaacaataagtgatgttgatagatttagaaaagtattaacagagggaatcggtaagaagaaagcctatggtttcgggatgatgactgttatacctgtgggtgattgaaatgaaagaaaaatttggtgctaagaaaacctccttaaaggaacttcctaaaataagtgacagagtcagttttatttacgttgaacatgcaaaaatcaacagagttgacagtgccattaccgttagtgatagtaatggtacagttagaataccagcggctatgcttggtgtacttttattgggaccaggtacagatattagtcatcgtgcagtagaactaattggtgatactggaaccagtatagtttggataggagagagaggtgtccgtcaatatgctcatgggcgagccttggcgcattcgactaaatttttagagaagcaggcgcggctagtttccaattcacgttcacggttaaaagtagctcgcaagatgtatcaaatgagatttcccaacgaggatgtttcatccctgacaatgcagcagctacgaggccgagaaggggctagaattagaaaagtatataggctgcaatcgaaaaagtataaagttccttggacaaaacgagaatatagtcctgataattttgaagatggaacagctgtcaatcaatctttatctgctgctaatgttgccctatatggtttagtacatagtatagtagtagcattaggcgcctctccgggtcttggttttgttcataccggtcatgatttgtcctttgtttatgatgttgcggatttatataaagcagagtttactattccaattgcttttgaagtagctgccaatcatgaaataggggatgatattggaaggattacacgtttgaaaatcagagattcttttgtggatgggaaactaatggctagaatcgttaaggatatacaatatttactggacatagaagccgaagatgaactgctgatagatatacttgctctgtgggatgatagagaaaagcttgtaaaacatggtgtaagctataaggagaattcttgaaatgccactaactgtaataactgtaaaaaatgcacctccatctttaagaggcgatttgacaaaatggatgcaagaaattgctacaggtgtctatgtaggtaattttaatacaaaggtcagagagcaattatggaacagggtaaaagatagcgtaagcaatggtgaagcaacgctgagttttgcttatcgaaatgaaatcggttattgttttgacacgatgaatgctcaaaggaaggtcgttgattttgaaggaattcctttagtacaactgcctaattccaacaataatatcaaggaagaaatgaatctaggatttagtcatgctgctaagtttagaaaaataagaaggtattcaagccattctaaaaataacagtccttctttagtcccttatgtggtcatagatattgaaacagacgggctagatgaaaatgaaaatagcatcatagaaattggcgctgtcaagattggcccctctcaattggaagagtttaattatcttgtaaaatatgataaaattctaccaaaacagatatcgaaattaacaggaattagtcaggaacttttggatcgtgatggtaaagaccttcaagttgtacttcaggaatttttgaattttatcggaaatcacgatcttgtcggatatgggataaattttgatataaaatttataaataaaaagttgaaagaattaaatcagcccttattgaaaaatcgagtatatgacttaatgcaatacgctaaaaaagaaaaattatttttagataattataaattgcagacggtattaaaagcatacgaaatagaggatgaggtgcctcatagagctcttcacgattctaaactgatttatgacttgtcaactaaaatgaataaatttttgaaagggatcaatcagaagtagcggttttattgggatcttttagtattttacccgcacgagcgggggtgatccattgctttctcgccaaatctgcgaaccagttcaaattttacccgcacgagcgggggtgatcccttctctgtcagtaattgagataccgccatctgattttacccgcacgagcgggggtgatcctgcggttcagcaggttatctgtagttttttggaattttacccgcacgagcgggggtgatccctcacgcaattttgtaactccttataaatttatattttacccgcacgagcgggggtgatcccagcatatctgaatgatagcttagctgtgttgtattttacccgcacgagcgggggtgatcccagaagcggatttgctagcatatgcgcgcagatattttacccgcacgagcgggggtgatcctagttttaaaattccgctctcttggcacgaatgattttacccgcacgagcgggggtgatcctacgtgttgatgtatctgacgtattttcaagcgattttacccgcacgagcgggggtgatcccggagcaagtcttgcggatgtcattcaatccatattttacccgcacgagcgggggtgatcctatagccatatgatggtttagcccacatcatagattttacccgcacgagcgggggtgatcccgctgtactaaactttgggataattcattgtttattttacccgcacgagcgggggtgatcctaaatactttgcttgataatacagagtatgcagattttacccgcacgagcgggggtgatcctagtttaattatcatatgtacgctcgttctctaattttacccgcacgagcgggggtgatcccatctatgacagccttaaagagggttatagaggattttacccgcacgagcgggggtgatcctatttgccagaaagtctgcgattggtttgaagaattttacccgcacgagcgggggtgatccttccaccgcttgaaaatacgtctgatacatcaaattttacccgcacgagcgggggtgatcccagcagataatggaatagcgtttgactattggaattttacccgcacgagcgggggtgatcctatacataacctcttgacctgctgagtacatgcattttacccgcacgagcgggggtgatcctggataatttatattctaaattatttatttctgattttacccgcacgagcgggggtgatcccactgtatttccaacccgaacgccaacacccgtattttacccgcacgagcgggggtgatcctacggcatgcaatgcgtagatatagatacagacattttacccgcacgagcgggggtgatcctaaaattatctcattgtttctttgatgatgtgaattttacccgcacgagcgggggtgatcctggatccaaaatggatccacaggtaaggttaggattttacccgcacgagcgggggtgatcctatagtgctcgctgtccctcgttgaaagctgttattttacccgcacgagcgggggtgatcccagtgacaacaacgaatcagatacagaaatcatgttttacctatacatatagacttgtgatgttagaccgattgaaattgattcttttggatagaaggaaatcaaatatatatattaagtggatgacaataaaagtaaaatattagataatagagattaagaattataaagaattggaaaatgtttagtcgtcaaacctaaaatcattataatgttacgaatatttttttgatcaattttgtgataatataaagaagcgacatgcttaccaattatttcaatctgatagaggtaataatgaaacttttatataccgacattccatacaacataacagagattttggccgaggaagcacaaatagctgctaaggctggcaagcgggtcttttatattgctcccaactccttgtcttttgagaaggagcgagctgttttggagaccctgcctgagcgggcttcctttgctattaccattacgcgttttgagcaaatggcacgttattttgttttaaatgatattcatcagggagaaaccattgatgataatggacttgccatggttttttatcgtgctttatccagtttttcagaccaagatttgcgtgtttttgggcgtcttaagcaagatgctcattttatcaatcaattggtggatttgtataaggaactcaaggcttctaatctgactgtcttagaattaaatcagctaaattcggctgaaaagcaggaagatttgattaagatttttacagaggttgaaaccattttaagtgctggccattttgataatcaaagcaagattgccttctttgcacaacagatcaaattcggtcatttagatacggctttgcaggatttgacaattgttgttgatggtttcacacgtttttctgctgaagaagaaaacctgataggactgttatatgaaaaaggtgttgacattatcattgggacttatattagtcaaaaagcttatcgttcaactttttcgaatgggaatgtctatcaggctagtcttgatttcattcgtggtttggctggtaaatttcaaaccaaaccagaatatgtggtatcaaagcaagaagctttgcctgcctttaccaaactttctcagctatttgaaagtcgtcatgatttttcggacagtcagctggtcttgacagataaggacaaggaacatgtaactatctgggatgtcattaatcaaaaagaagaagtggaacatgttgctaagagcattcgccggaaactctatgaaggtcatcgttacaaggatattttggtccttcttggggatgtggatgcctataaactgcagattggcaagatttttgataagtatgaaattccctattattttggcaaagcggagtccatgagttcgcacccgctggttcattttgtggattctttggagcgggttaaacgttataattttcgtgctgaggatgtcatgaatctgctcaaatcaggcctatatggcaaaatcaggcaaaatcagttagataaattggagcagtatgtcatttatgctgatattaaaggaaagacaaagttttttaaggactttacgctagataatcatgggcaatttgatctaaaagccttaaataaactgcgggcagaagtcatgtcacctttacaagagctggttaaaatacaggctcaaaagggagacagtatcctgcaaaaattgaccaactttttagaagccatttctttaacgaataatttttcaaaattaatccaaggtgtcagtgacactgagcaggaaaagaacgagcaagtttggaaaacttttacggttattttagagcaatttcatacgatttttggacaagaaaaaatgaagttggctgattttctggcactcttacgcagcagcatgctggcggctgattatcggacggttcctgccagtgttgatgttgtgacggttaagtcttatgatttggtggagccccatagcaataaatttgtttttgctctgggaatgacccagtctcattttcctaaaattgtccataataagagtcttatttcggatgaagaacgtgcaaaaatcaatgaagcaactcctgacaatcgtcgttttgatattgtcactaaggaaaatctcaagaaaaatcatttcaccgccctgtcactcttcaatgcggccactcaggaattggtcttaaccttgccgcagattttaaacgaggcagaggacaacacctcctcctatttgcttgaattgcaagatatgggtgtgccagttgtcgaaaaggggggcaatcgtttagctgcggatccagaagatattggcaattacaaggcgcttttgtcgcgtgtgattgagcttaaccgctctgctattgaccaagaattatctaaagaagagcagaccttttggtcagttgctgttcgctatttacgccaaaaattggcaaaagaaggacttacgattcctgaagtgaacgataagatgcagaccaagcaggtcgctgcagaggttatggcagcacgttttccaatagatcaacctttaaatctatcatcgtctgccctgacaactttttacaataaccagtatctctatttccttcaatatatccttggtttgcaagagcttgaaacgattcatcctgatgctagaaatcatgggacttatttgcaccgcgtgtttgaattggttatgcaagatcaatctactgatgattttgacagtaaattaaatcgtgccattgatataaccaaccatgaggatagctttcacttggtttataatgaagatgaggaaagtcgctatgctttgggtattttagaagatattgctcgtagtacggctaccattttaaaaggggataatcctgttcaggtagaaagtgaagaagaagcctttgagttaatgctggatcaaactgttaaaatcagaggggttattgatcgcattgatcgcttgtcagatggcagtttaggaattgttgattataaatcaagtaaaaatacctttgatctgcaaaaattttacaatggactcagtccgcagttagtgacttatatagaagctcttcggtcttgtaaaaatttgaatgatacagataagatttttggagccatgtatcttcatatgcaggaacctaaaactgatttagccaatatgaaatccatcgaaaaaattccggaaacggttcataagaatttaagttataagggactctttttagaagatgaaaaagcacatttggctaatgggaaataccatttgcatgatgctgtctatagtcaaaaagaagttgatttgctgcttgattataataaaagactctatcgcagtgccgcaaagcaaatcagaaaaggaaactttctcattaacccctacagtcaggatggcaaatctgttcagggagaacagctgaaggctattacacattttgaagcagatcgccacatgccttatgctcgtaaactttatcagctgccacgcaaagaaaaacgtcagggtttcttggcgttaatgcagtctaaaaaagaggaggaaggtaatgacctttaaaccatttttaacagatcaagaaatagcttccttacaaattcaagaagctcagtctgataagaaacaaaaacgaacgcctgagcaaattgaggctatttacacttcaggaaccaatattttggtttctgcctctgctggttcaggaaaaacctttgtgatgattgagcggattatggataaaattctgcgtggtgtaacgattgatcagctttttatttccacctttaccgttaaggctgctggtgagcttaaggagcgtttagaaaagaaaatcaccgagcaattgcgtttgacaaatgacactgccctcaaacaatttctcagcgaacaactcttgggattgcagactgcggatattggaaccatggatgcctttacccaaaaattagtgacacagtacggctataccttgggaatttcaccgaattttcgaattttacaagataaaagcgagcaggatcttcttaaaaatgatgtctttgacgacctttttactgattacagaactggcgatcaagcagagcttttcactaagcttgttaggaattttgctggaaatcgaaaagattcgagcaattttagacaaatcatttacaaaatttatgatttcagtcaggcaaccgataatccccaaagatggcttttggagaatttcttaaagggagccaatacctataaggatttttcagctattcctgaacaagaagtgaaagactttttgaatactttgcaggaaactgctctcgctcttcgtgatgtgacggatttagaagattacaagcaagtaacggctaaaggaactccaacagcagcttatcaaaggcaccttaaaatgattgagcagctgcaggattgggtcttgcattttgacagtctatatgggcgagatggtctggggaaattagcaaatgacattgcaacactcattccatctggtaacgatgtgacagtagcaggagttaaatatcctgtctttcgcagtttgcacagtcgcttaagaggactaaaacacttggaaacaattttcaagtatcaggatcaaagtctgcctttgttgcaagtactgcaatcttttacccttgatttttcaaaacaatacctgcaagcaaagatgcaggaaaatgcctttgagttttcagacattgcacattttgctatccagattttagaagaaaatgatgctattcgtcagctttatatagataagtatcacgaagtcatggtggatgaatatcaggataataatcacacccaagagcgcatgttggaacttttatctaatgggcgcaatcgcttcatggtaggagatattaagcaatctatctatcggtttcgtcaggcagatccacagatttttaatcaaaaatttaaggattttcaagaacatccagagcatggaaaactcattctcttaaaagaaaactttcggagtcagtcagaagtcttagatgctaccaatagtgtttttacgcaccttatggatgaaacggttggagaaattctctacgatgatacccatcagcttgtggctggcagttcagctcagaaaattccttatccgcaaaatgaaacacaagtcctcatctatgatacaaaggatcagcaaaatcaagatcttgctgtagaagatgatagtaatcaaatcagtctaggtgaggtcaaattggttgctaaggagattattcgccttcataatgaagaaaaggttcagtttgaagatattaccttgcttgtctcatcgcggacacgcaatgatggtatcttgcacacctttgatgattatggcattcctttggtgactgatggtggtgaacaaaactatctgaaatcagtggaagttatggtcatgttggatactctgcgttctattgataatcctctcaatgattatgctctagtagctcttttgcgttcacctatgtttgcttttgatgaggatgacttggctcgtctagctctgcaaaatctaccagatcaacacaaacaaaatctttatgaaaagatggagaatgccagaaatggccaaggccagcaagttcagttgatcacaggagcattgtctgccaaattggatgctttctttgaaactttcctcagttggcgtgagtttagtctcttaaattcgctctatgatttgatttggaaaatttataatgataagttttactatgattatgtgggaagtttaccaaaatctgaacagcgccaagccaatctttatgctctagccctgcgtgccgataactttgagaaaacaggttttaaggggttgtcgcgcttcattcgcatgattgacaaaattctagaaaatcaaaatgacttggctgatgttgaagtcgctttacctaaaaatgcagtgacgctgatgacgattcataagagtaagggattggaatttaaatatgtctttattcttaatattgataaaaaatttagcattcaagatatgacatcacccttaatcttatcgcggcaaaacggtgttggtatcaagtatattgctgatatgaaagaagaactagaggaaaaattattgccgacagttaaagtcagcatggatactcttccttatcaactgaataagcgtgagcttcgcctggcaaccctatctgaacaaatgcgattgctttatgttgccatgacacgatctgaaaagaaactttacttggtcggaaaaggcagtcaggaaaaattaggggataagtatgatggcaaatcagaaaacaatcatttgccagtagctgatcgtgaacactatttgacttttcaggattggcttttggcgattgaagctgcttatgctgccgatgaacttcattttaaaacaagttttataacggatgaagacttaacagaagataaaatgggaagtttagaagcagagcaggcttatgatgcggataatcttaaggataatcggcaatcagatgatattgcgcgtgctttagatatgttagaagcagttgaaaaattaaatcagcactataaggctgctatccatttaccaactgttcgtacgccaagtcagatcaaaaaattttatgagcctgttatggaaacagaaggtgtagaggtgatgcaaacttcctatcagactaaaccaaagtttgagctgcctcaattttcaaaaaaggcgaaacaagatccaacagctcttggttcaagtgttcatgaacttatgcagcggcttcatttgagtgaacaggttagtcttgaggatattttaactgctctggcagaactatctgtagaagaaaatgttaaaaaagctattcaggttgataagattttgcatttcttccagaccagccagctggggaaactcattcaagcaaatgctgacaaggtctatcgtgaagcaccctttgctatgctgcaagcggatcctgcaagcggagaagactatgtcgtgcgggggattattgacggttacattctttttgataatcggattgtcctctttgattataaaacagataaattcactaatagtcaagctattaaagagcgttatcaaggtcagatgacactttatgctcaagctttgagccaatcctataatatccaacaagtagacagttatttaattctattaggcggtgaaaaattagaagttgtggaaatttaatagcagacatattccaaaaaagagtagtctaatgaaaagaaccacttataatggacagtataaaaaagttatacactgttcttataaggaggttcttttcataaatactcttttttatttatgaaaagaactgttatttaaacgtaatgtttgttttatgtttgaatatcgaaaaaaaattaaaaatattatataatagaaaaaaagaaggaaaagaggtatttatgaagaaggaagaacggttagaagaaatcacaaaactcattaataagcgagggaccattcgggttactgaagttgtggaacgattaaaggtatcagacatgactgtccgtcgcgatttaactgaattggaaggcttgggagtattaacacgtattcacggtggggctagaagcaataatatttttcaatataaagaaatgtcccatgaagaaaaacattctcgacaaatagaagaaaaacactatattgcacaaaaggctgccgagttagtagaagaaggagatacgatctttttaggaccaggaacaactgtagaactgctggctgaagagattaataagacaactttgcaagtcatcaccaactgtcttcctgtttttcagatcttatcgcaaaagcaatcagagacgtttagagtccatttattgggcggcgaaatgagaagtatcactcagtcttttattggagaaataacaaatatcgttttagaaaaaatgcatttttctaaaatgtttttcagcggcaatggtgtcaaaggaaatgaagtgatgacatcaagtttccaagaagcttatactcagaagatggctttaggaagggcaattgaaaaatatttgctgatcgactcttcaaagattggaaaagaagattttacgtcattttatcagctgtcacaattgacagctctgattacagattgtcaagatgacgataagcttcaaaaactgagcaaatatactgagattattaactaaatcgttagataacaaaaagtgatcagaaaaataagataatcaaagagagcgagagaagaccttcaagattgtttagcaatcatagcggtctgactcggactcttatttttttgtttttttgcgtaaaaacactcaaacttcaaacaaaaattatattttatcaacagaaaaaggaaatattttttaaataataccaaaaatgtttaaaaaataaacaaaaatgtgttgattttttaaacaagttatagtatattataactaaagaaaaacgaaaacgcttttctgactaaaaaatcatttcaaggagaatgactatggcaattattattggttcagatgcagctggtaaaagacttaaagatgttattaaaacatttttaaaagataacaatcatgaagttttagatgttactgaaaggaaagatttggattttgtagattcaactttagcagttgtacatgaggtacaaaaaaatgataaaaatttggggattgcaattgatgcctatggtgcgggcagctttatggtagctactaaagtcaaaggtatgattgcagcagaagtgtctgatgaacgttcagcttatatgacacgcggccataataatgcgcgtatcattactcttggtgctgaaattgttggagatgaactggccaaaaatattgttaaggactttgtagaggctaaatatgacggcggccgtcatcagatccgtgtagatatgctaaataaaatgtgctaaagacaaatagagtgaggaaatgaaaatgaaaattgctattggttgtgaccatattgttactgatgtgaaaatggaactatctaaacatctaaaagaagaaggttatgaagttctagatgtagggacctatgactttacacgtacgcactatcccatctttggtaaaaaagtgggcgaagcagttagcagtggtgaagcggatttaggtgtatgtatgtgcggtactggtgtgggtataagtaatgctgccaataaagtaccgggtgttagaacggcattagtaagagatatgacttctgcactgtattcaaaagaagaacttaatgcaaatgtcgttagctttggcggcgctattataggtaagttgttattatttgatattgtagatgcttttattaaagcccagtacaaaccgacagaagaaaataagaaattaattgctaagatcaaacatttagaagcacataacgataaacaagcagatccgcatttctttgatgaatttctagaaaagtggaatcgcggtgactatcacgattgagtaaggggagttatcattatgatgctaacagttacgatgaatccttccattgatattgcttaccagctggatgacttaaaggttgatactgtcaatcgtgtcattgaaacgcataaaacacccggaggaaaaggattgaatgtgacacgtgttctgtctcagttaggagacgatgtccttgctagcggccttcttggtgggaaacttggtgaatttttagaagcggaacttgataagtctgccataaagcattctttttataagatttctgcagagacaagaaattgtattgctattttacatggtggctatcaaacagaaatattagaacaaggaccttatgtttccgctaaagaatctaaagggtttcttgaattttttgaaaaattacttccaaaattagaagttgtcgcaatttcaggaagtcttccaaaaggggttcctgtagactattattctcaaatgattgcgatttgcaagcaacatcaggttcctattgttttggattgttcaggtcaggctttgttggaagtgttaaacggtgcagctaaaccaactgtcatcaagcccaatacagaagaattatctcaaattatggaacgggagattacaaatgatgttgctgttttaaagcatgctttggctagccctatcttttcaggaattgattggattattgtctcacttggttctcaaggtgcttttgccaagcatggtcaaacattttataaggtcactattcctaaaatagcagtcgttaatccagttggttcaggggattcaacggtagctggaattacatcggctcttgctgcaggagcaagtgatgagaaattgctcaaaaaagcgaatacacttggtatgctcaatgctcaggaaaaattaactggacacgttaacttagaaaattatgataatttataccaacaaattgaggtagcggaggtttaaaaagatgacattaacacaagaaaagcgcagttatatggaaaaacttagtgatgaaaatggaattatttcagctttagcttttgaccagcgtggtgctttaaaacgcttgatggcgcagtatcaaacgcaagaaccaacgattgctcaaatggaagagctgaaggtcttagtagcagaagaattaacaccttatgcttcatccatgctgcttgatccagaatatggtcttccagcaacaaaacatttggataaaaatgcaggtttgctccttgcttatgagaagactggttatgatacaacaagcactaaacgcttgccagattgtctggttgaatggtcagccaaacgtttgaaaaaacaaggtgcagatgctgttaaattcttgctctactatgatgttgatggtgatgaagaagttaaccagcaaaaacaggcttatattgaacgaattggttctgaatgtaaggcagaagatattccctttttccttgaaattctagcttatgacgaaaccattactgatgccgcaagcgttgagtatgctaaagtaaagcctcataaagtgcttgatgctatgaaagtcttctcagacgagtgttttggcattgatgttctgaaggttgaggttcctgttaacatgaagtatgtcgaaggttttggtgatggcccaattgttcacactcaagatcaagcagcaaacttctttaaacaacaagatcaagcaacaccgcttccctatatttatttgagtgcaggtgtttctgctaagttattccaagatacgcttgtttttgcaaaagagtcaggggctaattttaacggtgtcctttgcggacgtgccacatgggctggttcagttaaagattatattgaaaaaggcgaagcagcagcccgccagtggcttcgtacagaaggattcaagaatattgatgagctgaataaggttttaaaagcaaccgcaacgtcttgggaagaaagatagaaaggtggaaaagagatgaacagagaagaagcgactcttttggggtttgaaattgtagcctatgcaggagatgcacgttctaaattacttgaagctttgaatgcggcacaggccggtgagtacgatagggcagaagagcttgtagctgcggcagatgactgtattgttgatgcccataaagctcaaacaagccttttggctaaggaagcacaaggcgatgatattgaacttagtgttactttaatgcacggacaagatcacctgatgacaaccatacttctaaaagatttgatgaaacatttaattgaattgtacaaaagagggagctaaaataatatgaacacattgattgctcaaattgaaaagggaaagcctttctttgaaaaaatttcgcgtaatatttatttacgtgctattcgtgacgggtttatctcggcaatgccggtcatcctattttcgagtatttttctgttgatcgcttatgttcctaatatctttggttttacttggccaaaaggtattgaaaacatgttgatgacaccctataactatacgatggggattattggtttcctagtggctggtacaactgctaaatcactaacggattcgatgaaccgccaattagaaaagaccaaccagattaatttcatttcaacaatgttagcttctatggccggtttcttaatcatggcagcggatccagctaaagaaggtggtttcttgagtgcctttatgggaactaagggcttgttaactgctttcattgcagcctttattactgttaatgtctacaagatttgtgttaaaaataatgttaccattcgtatgcctgaggaggtaccgccaaatatctctcaagtgtttaaagatatttttccatttgccttttccattattattttgtatgctatccaattagctattaaggcagttattggagtaaatgtggctcagtcaattggaaccttgcttgctcctttattttcagcagccgatggctatcttggtattacgattatttttggagcttacgccttgttctggtttgtcggtattcatggtccttctattgttgagccggctattgcagccattacatattcaaatgttgaattgaatgcacatttgattcatgctggtcaacatgctgataaagtgattacctcaggaactcagatgtttattgtaactatgggtggtactggtgcaacattagttgttcctttcatgttcatgtggttatgtaaatcaaaacgcaataaggctattggacgtgcttctgtcgtgccaactttctttggcgtcaatgaacctatcttgtttggagcacctattgttttaaatccagtctttttcatccctttcattcttgccccaattgttaatgtttggatttttaagttttttgttgatacccttggaatgaacagtttctttgctaatcttccatggacaacacccgggccaataggcattgtcttaggaactggatttgctgttttatcttttgttcttgcagcacttttaatccttgtagatactgtcatttattatccttttgttaaagtttatgatgaacagattttggctgaagaagctgaaggtaaaagttcatccgatgctttaaaagaaaaagtagcagctaactttgatacgaaaaaagctgatgctattcttgaaggtgctgaatctaaagaagagccagcaactcatgctattactgaagaaacaaatgttctcgttttatgtgccggcggcggtaccagcggtcttttagctaatgctttaaataaagccgcagaagaatacggagcccctgttaaggctgcagctggaagttatggcgctcaccgcgaaattttagaccaataccaattagtcatcttggctccgcaagttgcttctaactatgaggatatgaaagcagaaacggataaacttggcatcaaattagctaagaccgaaggtgctcaatatattggtttgacgcgtgatggcaagggagcgcttgcctttgtggaagaacaatttaaagattgagaggtcacactatgagcaaaacattacctaaagattttatctttggtggtgcaacagcagcttatcaggctgaaggtgccactcatgcagatgggaagggtcctgttgcttgggataaatatttagaagataactactggtatacagctgaacctgccagcgatttctatcatcaatatcctgttgatttaaagttggcagaagaatttggcatcaacggtattcgcatttccattgcttggtcacggatttttccaaaagggtatggagccgttaaccccaaaggtcttgccttttatcataatctttttgctgaatgccataaacgtcatgtggaaccttttgtaacacttcatcactttgataccccagaggctttgcattcaaatggtgactttctcaaccgtgaaaatatagagcattttgtcaactatgctgaattttgctttaaagaatttccagaagtgaattattggacaactttcaatgaaattggccccattggtgatggtcagtatctggttggaaaatttccgccgggcatccaatacgatcttgccaagcttttccaatcccaccacaacatgatggttgcacatagtaaggcagtcaaacttttcaaagatggtggctactctggcgaaattggtgtggtgcatgctctgccaaccaaatatccttatgatccaaataacccagcagatattcgtgcagcagaattagaagatattattcataataaattcatcttggatgcgacttatctgggtaagtattctgagaaaactatggaaggggtcaatcatattttggctgtcaatggtggtcaattagaccttcgtgaggaagattttgctgctcttgaagccgctaaagatctcaatgatttcttgggtatcaattattatatgagtgattggatgcgtgcttttgatggtgaaaccgaaattacgcataatgctaaaggcgaaaaaggaagttctaagtaccagattaaaggtgtcggtcgcagagaagcgccagtaaatgttcccaaaacagattgggattggatcatttatccgcaaggactttacgaccaaatcatgcgagttaagcaggactatcctaattacaagaagatttatatcactgaaaatggtcttggttataaggatgaatttgtgaatcatactgtttatgatgatgcccgtattgattatgttaaaaaacacttagaagttctttcagatgctatagcagacggtgccaatgtcaaaggttactttatctggtctctgatggatgtcttctcatggtcaaatggttatgagaagcgctatggtctcttttatgttgattttgatacgcaagagcgttatcccaagaaaagtgcctactggtataaaaagttagctgagacccaaataattgactgatgccggtattttaatcgcatttggtaatcatttgcgttgtttgggaggcttgctgtcttgactgaaattaaatcaaaaagcttgttacttcaatattttctcaatatatcctatatttaatgaatacttccaaaaaacagcctaaattttggataaagacagcaataaaaacaagagtgatagtctttgattgcactcttgctttgttttaatgttaaaaatatgaagtaagaatgaggataagtaatggttattgaactaaaaaatgaaaaagtaactgtccagtttaaagagtttggcggtgctttgtcttctatcaaagatcaagatggtatagaatacctatggcagggaaatcctgcctactggagttctcaggcaccggttctttttcctatttgcggcagtttaagaaatgataagggcatttacacgtctaagaaacactcacatcgttatggcagcatccctagacacggcctggtgcgaaagaaaaattttcgctttgagcaactgggaaaagacagtgttgtttttaccattactcctgacaaagaaatgctgatgcaatatccctatcattttgaattaaagattatctacactttaaagcatacaactattcgcacagagtatcaggttattaacaaagaaaaagaaagcatcatgccttattttatcggaggccatcccggtttgaactgtcccttgtttgcaggagatcgctatgaagactactatcttgaatttgaaaaggaagaaacctgtacagtaccaaaatcttttcctgatacagggttgcttgatttacaagacagaaaaattttcttgaaagggcagaaataccttgatttggattattctttgtttacgcatgacgccattactttagataacctacaatcaagaagtgtcagtctgcgttctaaaaatcacggcggaggcctgcgtttggattttgcagattttccttaccttattctttggtcaacagccaataagagtccttttatagccttagaaccttggagcgggttgtcaactgcggtagatgaatcagattattttgaagaaaaacgcaatgtgagctttgtagagcccggacagtttgatcgaaactattttgacatcactgttttataaaattgaaaggagggagttaatgatgacttctcttaaaaaaatagctaaaaacgtcatctcatcagcctttgagatagtctatatcctgaccttcaccaatcaaaaagatgttccgaatatgacagaagaaatcaagcgattgggtaagtggtatgtcaatactggtgatgaatggatttgtcattcaaatctacctttatccgaatttcaagagaaatttttggagctgacacatctgacttctgagcaagtgttcttgactaaagatcatctgccattttcaaaataaagctaaaagatggacatctagcttatttttaatattgcaggctcactttgctgtaaatcagtacggtctgtagcttgctgcctcgtcctaaaagactaagttagaatagcaatcttcttttagtatcagggaggttctttcaaaacagtctaaaaatccatttggagaagataatgctccaaatggatttttacttaaccccaaaatttcttagcgatttcttggccttgtttgattttagcccattgctgcgggatagtcaactcattgccagaatcacaagaggcaaaaccgcattgatgtgacagcagcaaacgttccttaggcaaaatggtgctggcttgttctaataatttgagaacacgttcttcatcatcaagatcagttgtcttactggaaaggagtccaagaacaacctcagcatctttatctttaagagaagcaagagccttcaaatcacctgagacgtcactgtcccattctaagaagaagcggtcatagtgttgatcacgcaagaatttttccgcaatcgcttcataagttccgcctgaggcagaacggctttcataatttccgcggcagttatgtgtccaaactttgagtcctaattgatgaccgtaatcagctacttcgttattgatcgcaatgaattcatcagctaaatcagccagcgcagcattgccatcagcaaaaaacgaagcaggatttgattcatcaaaaagttcccaaaggcagtcatcaaactggataatctcaccgccagcttctttgtattctgtcaagaattccttgtaggccttgataagaccagcttttaattcgtcattggttttgtaaacttgcccttcaccagcaagtttatcaaagatagtcagttcagtataagcatgcgcaggtccccaaatcgttaattttgtttgcctatcaccagcttcttccttgagcagtttgtaaatatctaaaaaatgatgatttttacctgaaagtggctgggtaatgcgaataccgatgtctttacgtgtttcgtactgtccgccatcatggtctttaaaagtgtagccgtggtctgcaatgtaacgttcaatacctttaagtccccaaataaaatctaaatgccacatggacttagaatattcaccatctgtcaaaatatcaataccatttgccttttcatcagcaatgacctttttaatctctgctgtttctgtttcacgataacccggaaaactatcataaaaaggatactgaatgtcatcacgatgttcaattttatttttatagtcaagcagatcatctggacgaagaagagatccaactagttggaattttgattgtgtcatatacatgcctctttctagatttcttgctttttattgtacaaaagctgagcacttttgaaaaatagttaatttagagaaaagcatatagttttaaactataactaaaaagacagtttttgcctaaacacaaacgccttctcctcgaaatgaaaaagtagttttccccatctccgccttttttggtaaaatagaagaaaaaacaaggagcaatttataaccgatgcgcgataaccatttacacacccatttttcctatgattctgacgctagctttaaggactacctgactcactatgatggggaaattgtcacgactgagcactacgacctgtccaacccctacactcagcaggatgatgtacctgattatgaggcttattctaaagaaatagccgagcttaatgcgaaatacggcaaccgcatcaagcgaggcattgaaattggttattaccagccccgcgaagcggacattctcagcttcctagcggacaaggactatgatttgaaattgctctccgtccatcacaacggcgtcaatgattatctggatgatgaaatggcagatatggacaaagaggccattatccaagaatacctagacaagctggaatacgccattggacgcgtagaagctgatgtgctggcgcatttcgactatggctttcgcttgtttgacctgacgattgatgaattaaagactcatgaaacccagctgcgccgcattttccacaagatgatcgaccacaacctagcctttgaactcaacagcaagtccatgtacctctatggacacgagcatctctaccgctatgccttaggcctagtcaaaaacttaggttgtcgcaaatactccatcggctccgacggtcacaaactcgaacacttccgcctagcctttgacaaaatccaaaagattttggatgagtatgggattgaagagggggagataatttaaaaagcagtggtgggttgctgatagataaaaatggaaggaaatctaacgatgtcaaaatatagtgagtttaaaaatttattgaacaagttcgttcaacaagcaaatattaatattaagagaggagcagagaagaaaacaaaattaagtggtatagaaaaaacgtatcctgcagtgactattgatggtattgattataaaattcaaatgtttatatatggtagtggaactggttatggacctaaagaaggccgaggaagtgttaaagcaccttactttggttatgagttaaattcagatttttgggttaacgtcagaataaagtttgaaaattttgaagtaaagacattaaaaattgtgaaatggaattctcatacaaataaggatgtcgaaactattttagaagttgacatcagtgatttaaatttagattcaacgtctacttcaaataaaacacttgaaaagttttatgatcaatttataagttttaaaaatggtagtaaaatgaaagaagaacaaaacgttgtagaagaaccatcatctaattgtattggagatagtaaatacgctcaggttttgaaaaactccaaaaacctcatcctccgcggtgcgccgggtactggaaagacttatctggctaagcagattgctgaggagctgactggtggtaatgaagagcagattggatttgttcagtttcacccgtcttatgattacacggattttgtagaagggttgcgtccttcttcgggtgatgatggtcagattggttttaagttgcaggatgggatttttagggagttctgtgagagagcacagaatagcttagctatatatgaacatgaacgaacaataaatgtagaaaaagaagagacagtgagttctgattttagtataaatactgttgagaaagcactaaatgatgatgactttatggcttatgcttggaatgaattcatggaggaagagtttgtaacttcaaaaagattttggtatgaagataaacatggtaaaaaagtctgttttcatattagtaaaattaatgatgatatcatagagtttgagggatatggtgatcgtaaaaatacgtttcaatatcgtagtttattagagccacgaattataaaaaatattattaaccctctttatatttcttccattggctctgattttttttattattataaattatattccattttcaattactgggtatttaaatatgctaaaaaatatgaagaaagtaaacgagtcaagaatataatagtagaagagaaagcaagtaacgattatccatattttgtcttcatcatcgacgaaatcaaccgtggggagatttccaagatttttggtgaattgttcttctccattgatcctgattatcgtggtaaagatgggaaagtaacaacccagtatgcgaatttgcgtgagacagataaagaattttatatccctgaaaatgtctatattatcggcaccatgaatgatattgatcgttctgttgatacttttgattttgccatgcgccgtcgtttcaggtttgttgaaataaaagcagcagatactatgggaatgtgggaaaataatgacaaatttgataatgataaaattgaagaagctagaaatcgtttgacaaacttaaatagggctatttcaaatacagaagggctgaacagtcattatcatattgggccatcttatttcttgaaactgaaagatcttgattacgattatgacattctttggtctgattacttagagccgcttttaaaagattatttgcgcggttcctatgatgaaacagatagtcttgataaattaaaagatgcttataataatgaggaagaaacagatgagactcactgataattcctcagttgccaaatctgaatttgaagcagactaccctcagttatcagaaaaattgctggacagaaccttagaaagtctttcccaagaggataatatccttatttttccgcatgatttgctggattctcctgatttggaaaaggacggcaaggtgctggagacggttaatggtcagattaaaacgcagaatattattggttttctgggctgtggggatgagcgtttgaccatccattctcgttttgctaatggggacgatgactattttttgcattatatgttgcaaaaggtgctgcagcttaacctaaccagtctggatgttggtttatctcaggaggatagttggtatcagttcttgatttatctttttccaaagtatcttcaggcggctttgcgcaagggactttacaaggaataccagcgttttttctacaatgacagccatgtcaaagggacgattgaggttgctcgacatattaagaaaaatgttccttttacaggaaaaatcacttattcgactagggaattttcctttgataatgccctcatgcagctgattcggcacacgattgcctttattcagcatactgttccaaatggtagagcgcttttgtccagttcagcatctgttagggaaaatacagctgaaattgtgcgcgtgacaccgtcgtataagttttcagatcgagcgaaaattatccaccttaaccagacacgtcccatacgtcatgcttattattatgaatatggcaaattgcagcagctttgcttgatgattttgcatcaaacaaagcatgggctgaatcaatcccagcaaaagatttacggccttctctttgatgtcgcttggctctgggaagaatatctggcgaccttgcttggagaggattttgagcacccgcaaaataaggtgagtaaaggtggtatttctgttttccaaagtggcaatggtcgaaaagtttatccagacttttacagccgtccgttaggtgtggtcttagatgctaagtataaaaaactggaaacgactgaaaagggtattgccagagaggatttgtttcagctgattacttattcttatatttcaaaggctcagctagctggtttgatatttccaagtacgggaaaagaaattgataacgatatcggaactcttgaaggctatggcggcatcttgaaaaaatggtcactcttaattccccaaaaaagcagcagctatgatgattttgtcaagcaaattcaagaatcggaaaaaatatttcaagaaactattcaaaaactcctaaacgaaagcgagtgcacattatgaccgaaaagctaatcctagtccgccccagtcttgattggaaagaggaattactggcttataaggaagcgtttaaaagtgagcacatgtacggcggagctggtctttacaaatttgataagttgtctgattggctggcgtatttagaaagactatcgacagataaaccggcagaagaaggatggacagcaacggtttttctctgcattcgtcagtccgataagcgaatgattggtatttgcaatgtcagacatcatctaaatagtttaggtttgcttaatgtttcaggccacattggttattctattcggcctgatgagcgtaagaaagactacgctaaagagcagctgcgcctagcattgttagaggccaagaaattaggcattgacaaggttttggtgacctgcgcagactggaatattggttctgaacgcactattctcgcaaacggaggtgtctatgaagacagccgtttggatgaatcaacggggaacatgatgaagcggtactggataaatgtgactgaaaggaacagcatatgaaactagtctttttgcatggtttgggacaggataagacggcttgggatgacgtgatagctgctctgcctcattacgactgtctagccttggatttatttgatgaaggaaaaatgcctgaaaattttacgactttggtggaacaagttgctactgaactcaaagggatagaagaagattttgtgttaattggtctatccttgggcgctatgctggctttggcgctgagtgactatacttttccgcatataaaaggcttcattgtttctggcgcgcagcatgatttgaagaggagttttctttataagttgcagcttcttggcctgcagctgcttcccaagtccttttttaaaaaacaaggagtagagaaggattcttttctagccttttcaaagtctctgtcaactcttgatttaagagaaattatccagcaaatagacatacccgctttaattctttgcggtcaaaaggataagcccaatcttttgcctgctaggaaaatagcagagctgatacccaatgctcgcctttctgtcatcaaaaaaggcggacatctgttaaacaccaaaatgccaatcgtttttgccaaagaaatcactgattttttaaagtatgagtctttttagagtaatgggtttagtgatatcatggtaaaatctgatgaagatgacaataaaaaccagcagatttttatctggctggcttcaattggggtggcacttttttggaataaattggctgttcatgctccattaaaatcactttgaggtgaaaccatttggcaaagtatttttgcagtcctttgttaagctttatttggataaaaatgatgagaaagatagcaacagcaccgcctagtccataaatgtagactgctgtttgtgtattgatctttgtgtaaagaaagattagttctgcaagaaagccataaaaagctatcagtccagcgtttaacgccataaaaaagaaataaaagagactttgaaacccaacatgtctggtctgatagattgctttatagttttcagttattttttcaaaagtcggcagtgttatcccatcataagacactgtctgtccataatctaccaactttggtgaagcatggtagtcaaataatcgacaaattttgtaattaatatttctcaaaaatagatagacgacagtcatcaaagctatcgcaaaagggaacaaacgcacacgtaaagaaggaaaagaaataaataaagttactaaagtgagaaagacaagtattaaattggctatttgtagtgcgatatataagcatttgattgcaaaagagtaatggtgctgcgacttataattttccatcaaagttctcctatgttctattcttaatgcgtcatgatatcttaataatataagtagataagtaacttgtcaatatttttgaaaaaacgatacgaattagtaagattgaattttttattgattaaaaaattcagttgcttaaatagatactaatagttttatttaaggtccctttcttatgttataataaaaagagctttctgtcgtttaaaggagatgaaaaaatgttaaaggcatgggcagttaagttctcaagaaagagcaaataaaagcttttcaagtcagttttacttgaaaagcttttattggtattttagtaaatcaattaacgtgtgacacggcggcgagcagcttttttacggttttcttcaatgaaggctgcttttttttcttctggatcaatgattgtttttttaacagcaaagactgccccagcaaccgttgcagcggtgccgataacacctgttgcaagacctctagcaaatgcatgtttcttagccataattaagtctccttttatatgttataataatactattatcttaaaaaataatatatttttcaaggaaaaagtctatgaaaacaaaattaattgttgttttaggtccaacagcagtcggaaaaacagcactgggaattaaattagcccagcaatttcatggtgaaattattagcggtgacagtcagcaggtttatcgaaagctagatattggtacggctaaggccacggctgccgaacaagcagcagttccacatcatttgattgatgttagagaggtagatgagaattattctgcctttgattttgttcaggaagcaacaaaagaaattgccagtatttgcgctcgaggttatcttcctattattgtcggcggaactgggctttatttacaaagtcttctggaaggttatcatttgggaagccaagttgatcatgaagctgttttagcctatcgaagagaattggaaaccttatctgacacagaactttctcagttagctgaaacaaaacaaattgttatgacagaacctaatcgtcgacgtttgatgcgttccttggaactccacaaatttagccaaggtgtccaaaatcaaggaagtccttatgatgttttattgattggtttaaatgacaatcggcaagatctttatgaacgcattaatgctcgcgttgataagatgatgacagcaggattgttagacgaagccaagtggttgtatgataattatcctcatgcacaagcaactcgcgcaattggttacaaggaactctttccttattttgcaggtgatattggtttggaagaggctgttgaaaaaattaagcaaaacacaagacgttttgctaaacggcagttgacttggtttaaaaaccgtatggctgtttcattttattcggtcagtgattcggactacaagggaaaaatcaatcaggctgttgccgattttttaagaaattagaaatcactatgaggtgatttttttcatagtttaagttgtttttacattaattaaatgctgatgaaattcttcaaaaaataggaaaaattgtcagacttttctagctggctgtgatataataaaaaccaagttgctattcatatttgcttggcaaaagaagacatttctctgaaagtgaaggaacaagaatgattgaaacaagacaaaaacaagaacgggtcattcttattggtgtcgctttaccaaatagtgaaaatttcgacctgtctatggaagaattagccagtcttgcgaaaactgcaggagctgaggtcgttcagacatacactcaaaaaagagaccactatgacagtaagagtttcattggttcaggaaaattacttgaaatcaagcaaataattgcaacggacgctattgatagcgtcattgttaataatcgtttgacacctcgccagaatgcctatttggaagcagaactaggagttaaagttattgatcgcatgcagcttattttagatatttttgccatgcgggcacgcagtcacgaaggcaaacttcaggttcatttagcccaacttaaatacatgctgccgcgtcttgttgggcagggtatcatgctcagccgtcaggctgggggtatcggcagccgtggtcccggtgaaagccaattagaattgaatcgccgttctattcgcaaacaaattgcagatattgaacggcaactgaaaaatgctgaaaaaaatcgggaaacaaaccgcgaaaaacgcttggattcgcaaatttttaaaattgggctgattggttataccaatgcaggcaagtcaaccatcatgaatgttttgactgataataagcagtatgaggctgatgaactgtttgctacacttgatgcgacaaccaagcaaatttatttgacagatcattttcaagctactttgacggataccgttggctttattcaggatttgccaaccgaactggttgctgctttcaagtcaacgcttgaggaaagccgacaagtggatttgttgcttcatgttattgatgccagtgatcctaatcatgaagagcatgaaaaagttgttcatgatcttttaaaggaacttggtatgacagccattcctcgattgcttgtttacaataaaatggataaggcagaaaatttcattgccagccaatttcctcacatcagcctgtctgctaagtctgatgaggcggcagcacttttacgtcagtctattttggaaaagatcaagactctttttgttccttttacgattacatggcgtcaagaaaaaggctataaactttatgaattggacaagatagctttgctgacttcttatgattttaaacaagaactgcaagaaattaaaggttacatttcggaaaaaaataaatggaggctagaggagttttatcgtgaattatcttgatttagcccttaagtatggtggttttactagcttagataaggtttacttgcaaaacaagttagcctttttgtcagatgaggaaaaattaagctttatcacaccgccgccaagcgttatcaatgcttattttgcggaactttatcaaaaggaatctcctcaggccgcaacggattattattttgaattgagtcggaacctacatttatttacagataaaccatcgtttgatgaacaaaagccttttgttcggcttaatttatcaggaaaatcttatgggtttgcttatgaaaatgaagaggaagaagcgcaggtctttagtgaaaaaaaggaagaaattactgacagtctcttatttgacttagctcagatatttccccagtataaaatttttagcgacaatcaacaaattaaaatgaaaaaaatgaactttgatgagtatcaaagtgaaacattggaaaatgctgcagctttgctcagcgacattagccgtctgcaagatggcacgattaaaataagaagtttcaatcaggaagaagttatagaattagcacaggcctactcaggacgcaaatactacagttatgctcaaaatcaggcagtgctttacctcaaagaagattaaccagtatagaaagaaagtattgttagtatggaaattcaatttttaggaacgggtgctggccagccagctaaggcgagaaatgtttccagcctcgttttaaagctgttagatgaacttaatgaaatttggatgtttgattgcggtgaaggaacgcagcgtcaaattttagaaacaactattaaaccgcgtaaaattagaaaaatctttattacccacctgcatggtgaccatgtttttggtttgccgggatttttatccagccgtgcttttcaagccaatgacgaacagacagatgttgatatttatggaccggttggtattaaacatttagttatggctagcatacgtacttcgggagctcatttaccttatcacattcattttcatgaatttgatgctaagcatttagggaaaattttagaaaccgataagtttatggtttatgcggaaaagctagatcacacgattttttgtgttggttatcgtgttgttcaaaaagatttagaaggaacgctggatgctgagaaattaaaagcagcaggtttaccttttggcccgctttttggtcgggtcaaaaatggtcatgatgtcgttttagaagatgggacgacaattattgctaaagactatatttcggctccgaaaaagggcaaggttattactattttaggagatacccgaaaaacagatgccagtattcgacttgctttgggagctgatgtactggttcatgagtccacttatagtaagggagatgagaatttagcgaggcgtcatgggcattcaactaatatggaagctgctcgtgttgcaaaagctgcttctgttaagaaattgctacttaatcacatcagtgctcgttttctttcacatgatattagccgtatgagagatgatgcacaggaaatctttactgatgttcatattgtcagagacttagaagaagtaaaactatgaaagaacgtataattgtcattacaggtgcctcaggggggcttgctgaagaaatcattaaacgcttaccgcagacagatcaacttgttttattgggccgtgataaggaaaaattagaagacatgtatgcctatcgtgaaagagtaacttgttttcaaattgatattaaagatgatgaggctgtgcaggatatagttgacaccatttatcaaaaatttgaccgcatcgatatttttattaacaatgcaggctttggtgaatttaaagactttgatcactattctaacagagatattcgagacatgtttgatgtcaatactttggcaaccatcaatttttctcgtttggttggtcaaaagatggcagaggttcagtcagggcatattatcaatattgctagtatggcgggcttgattgcttctagtaaatcaacgatttattcagccaccaagtttgcagtgattggtttttcaaatgctttgcgtttagaattagcagacaaagaagtttatgtcacgactgttaatccgggaccgattgccactaaattttttgataaggcagatcctagcggcaattatcttaagagcgttgaagaattcactttgcagcctgatgatgttgccaaaaaaatagttgctatttttggaaaaaataaacgcgaactcaatatgccttttctactaaaggcggcgcataaagcctatatcctctttcctaaattgtcggattttctaaccagaaaggtatttaactacaaatgattacttccaaatatgcttggaaaataaatgaaaaaaagccagatgatggcttttttgagctggctaaaaaagaaaatctcaatcctacagctgcacaaattttatatgagcgaggttttaaaacaagtgaagatatagaagcgtttttgagacctgatttgtctcaattacatgatccttttcttttaaatgatatggacaaggctgtcacgcgtattcgcagagctattgaaaccaatgaacgaattcttatctatggggattacgatgctgatggtatgacgtcaagttccattgcaaaggaagctttggaaatgctgggagctgaggtagaggcttatcttcctaatcgttttaccgatggttatggtcccaatctcagtgtttataaatattttattgagcagcaggatatatcactgattcttactgtggataatggtattgctggccatgatgctattgcttatgcgcaaggacaaggtgttgatgtcattgttactgaccaccacagtatgcctgctgagcttccttcagcttatgctgttgttcatcctgaacatccggatgctaattatccttttaaatgtttagcagggtgcggtgtcgcttttaagctagcctgtgccttgttagaatccattccgacagagatgctggatttggtggctattggaaccattgccgatatggtatcgctcaccgatgaaaatcgtgtaatggtcaaatacggtcttgaaatcctaaaacaaacagagcgcgtcggtctgcaagaattaatagcacttgcaggtgttgattttgctgatatcaatgaagaaaccattggtttcaagttagcaccccagcttaatgctttgggacgtctggatgatcccaatcctgctgttgaattgttgacaggctttgatgatgaagaagcaaagactattgcggccatgattaatgaaaaaaatgaggagcgaaagaccattgtacaggctatttttgaagaagctatgactctggttgatgagaacaaatctgttcaggtcttggctaaagaaggctggcatgctggtgttctggggattgttgcaggtcgtattatggaacaaataaaccagccagtcattgttcttaatattgaaaatggccttgccaagggaagtgcccgtagtttagagtcagtcaatatttttaatgcccttgatgcgcatagggatttatttatggcttttggaggccatgctggagctgcgggtatgactctagaggctgataaattagaagaattatcacaggttttaaatgattatattcaagaacatgcgattgatttatcgcaaaagtctgctttagtaattgatgaagaattgtacttgccagaacttagtttagatactttaaaagggcttgaaactttggctccttttggtatgaacaataaaaaacctatttttttactaagggattttacagtcaaacaggttagaacgatgggacaaaatggagctcatttgaagttaaaagtggctcaggaacaggctgcctttgatctccttgcctttaactacggttcgctcgtgacagaatttcaacaagctcagcatctcgaactagctgttactttatcggttaatcgttggaacggcaatactagtctacaattgatgctagttgatgcgcgtgttgaaggcattcagttgcttgatatccgtgctcgcaatagcgctctgcctgacggagttccctttttagaagatcaaacagatagtaaggcagttgtcttatttgaaataccggaaaaagaagaagaccttctagcactttttgaaaatcgggattttgaagtcatttattttaaaaataggattaagcatcaatattatttaacaggatctggaacgcgtgagcaatttgctaagctttacaagacgatttaccagtttccggaatttgatgtacgtcataagttaaaagagctcagtcaatttctcaaaattccagatattttgctggtcaagatgatccaaatttttgatgaattggactttgtttccattgatgatggcattatgacagttaataaagatgctcaaaaacgggaaatttctgacagtcatatttatcaagatttgaaaaaattagtgaaattccaagagttaatggcattaggaacacctcaggaaatatatgaatttttaaaacgcgatcgctaatctaagcccttttcaattttttgaagggctttttttgttaaaagaataacattttaataacctgacaataaatgtcatctttatatgttataataagcctgagaataagaggtggtaaacatgagagagagcagattatttcaaattctttatcagttattgacaaagaaaaaggtcacagcagctaatttagctaaacagtttgaagtttctgtcagaacgatttatcgtgatattgatgctcttagcagcagcggtattcctatctatgccagtcaagggaaaaatggcggtattcagctggatgaggattttgttttgtctaagtccttattgtcacaagaagaaaaagaacagattttagatggcctgcaaggtttaggttccgttaacggtattgtaaacgacaaacagttactgactaaattgtcagctttgttcaaagtgaaaaatcctaattggattgaggtccagtttagtccttggcaaaatcatgatcagcagcagaaattagttcagcttataaaagaagctatttgtcagaagcactttttttccttcctttatttcagtagtctagccaaacaaaccaagcggagggtcaaacctgttcgtcttgtttttaaagggcaggattggtatttgtatgcttactgtctcttaaggcagaactatcgctttttcaaactgtcacgaatcaaagagtggcagatctcaagcgattgttttgaagatgatttttcagaaatactgattaaaacggattttgattatgattcgacggtacatctatctcttaaatttgctcctcagttagcctttcgcgtttatgatgaattttcagatgtcactgcagatcaggagggttctttatatgcagaaattgatcttcctgataatgatgttttggaaagttaccttttatcgtttggagaaggtctagaagtcttacaacctgagactttacgtcaagccattcagaaaaaattgaagaaaatgttaacaatttataaaacctgacattagctgtccagtttgctatgttatactgaacttgtaaatgggggtgatctatgaaatcacaaaacatttatgttttcatgagttaagaaccaatcactttaagaattcttaacttatgacaaaacggttcagtcctgaaagacagatgcgcatctataatcggactcacactaaacagcaacaaagtaaaaaatagattcgtttccaaacaagtctaatactttcttggtataaaaaaggagaataacaatgaaacatgaatggcgtaaatttgaaaaagagttatacggtgtcaaagcaaaacccatttttcttgaagtagaagaacaacggtttattaccatcaaaggaaaaggaaaccctaatgatcaagatttctctaatcgagtatctgctctttatgctttagcttatggcattaaaatggcttataaacaagcaatgaagactgagcaggatgatcgggcagttactgattttgcagtctatcctttggaaggtctctggcagcaagcgaaagatgctaaggaggatactttggaaaaagataaactctcctatacgattatgattcgtcagcctgaatttatcactaaagaacttgttgaccaagctttagatagggtcaagatcaaaaaaccaaattctttttacgaatctatttcttttgaaagtattaaagatggaaaatgtattcaggttcttcatatcggatcttatgatgatgaaccgcagtcctttgctaagatggacgcttttgccaaagaacatggtttaaaacgttcgtctgacattcacagggaaatctacctcagcaatgcgcagagaacagaaaaaagcaagctcaaaactattttacgctatcaagtggaggaaaaatgatagctagaccgacaataaaaactgatttactcaatgcagccaaggatgactatcaggcattgaacactttgatatcatctctaagcgaataagaattaacagcagtttttgatttttcagaagatgagaaaaagaaagaggcacgttggaagcgtgataaaaatcttcgcgatgttttcattcatttatacgaatggcaaatgctccctttaaactggattgcttaaaatcaaaaaggagaaagggcatcttttttacaaaaacctcataattggcgaaattatggacaaatgaatattgaatttttggaaaaacatcagaaaacttctttagaaaaagctaagatactgttggaaaattctcagaaaaaactatttgctttagctaagcaattttcaaatgaagatttgttcgccaaaggaattttcgattgggttggagaaacaaccttgggagcttattttgtcagtgccacatcgagtcattatgattgggtcattaaaaagctgaaagcacatcaaagaaagtgtcagcacaattagacaattttacctaaatgaagggctgcttagccctttttgtatttttaagattaaagattttgaaaaaaagaatttcatgctataataaagcataaatgattttttggcagattgccctagaaagtaaacaaatggatttaaaaaattacattgcaacaattgaggattatccacaagaaggcgtcacttttcgtgatatcagtcctttgatggctaacggcaatgcttatagctatgctattcgtgagattgtccaatatgcgacagataaaaaaattgacatgattgttggacctgaagcgcgtggttttattgttggctgtccggtcgcctatgaattgggtgttggctttgctcctgtccgcaaaccggggaaactgccgcgtgaagttattgaagctcattatgaaaaagaatatggtattgataccttaaccatgcatgcagatgccattaagcccggtcaaagggttcttattgttgacgatcttttagcaactggtggcacagttaaggcaaccattgaaatgattgaaaggttaggcggtattgttgcaggctgtgctttcttaatcgagttagatgggctcgatggacgtcaggctattgaaggttatgatactaaagttttgatgaattttcctggctaattatagttggaacctatatctaactagagaaaatatatatttgataactatatctccctgttttataataataaatagacattatagaagtggagatattttcatgccaattactcttgataaaaaattaccagctgtggatattttgaagtcggaaaatatcttcgttatggatgataaaagggcaattcatcaggatattcggcccatgagtatcttgattcttaatttaatgccaacaaaggtagcaacagaaacgcaattactgcgcctgttggctaatacgcccttacagctgagtgttgactttctctacatgacgagtcatcattcaaaaaccactcaggctgaacatatgaagaccttttataaaacttttaaggatatcaaagacaattattatgatggcttgattatcacaggtgcaccagttgagaccatgccctttgagaaagttgattattgggaggaactctgtcaggtttttcaatggtctaagactcatgtttactctactttgcatctttgttggggagcacaagcagggttatattatcgttatagtgttgacaaggttcagatgacagataaattatcaggcatttatttgcagaaagtaaatgaacagctaagtcctttgatgcgtggttttgatgattgtttcctctcacctcattcgcgctacactgaagtattgctaaaagatgttaacaacaaaaccaatctagaaatccttgctagcggtgaaaaagttggtctgtctattttggccagtcgtgatatgcgagaggtttacagttttggtcatttagaatatgaccgagaaaccttggacaatgaatacaaacgcgatctcaaagctggtaagaatcctaaaattccggaaaattattatcaagatgatgatgtgacaactcatcctattatgcgttggaatctggcagcagcgactttttttagcaattggattaattacgctgtttatcaagaaaccccttatcgcttggaagagttggaaaaggatatatcattttatggctatctgtaaggaggtcttatgagttttttgcaacattataaatcagggaatttggtcttaccaagtgccttgctttttcattacaaagatatttttagtaatgcggatgattttctggtttggcaatttttctactttcaaaacaccacaaagatggaagacattgctacgagtcagatagccacagctattggcaagactgtcccagaagttaatcgctcagtatccaatctgattagtcaagagttgctagacatgaagacgattgaattggacggagaaagcgaagttctatttgatgctactttggcattgaaaaaactggatgatttgttaactgcagctgatgagacaactgtctcatcttctaaaggtataagtaatgccttgaaggatttggttgaagattttgagcgtgaattaggacgtatgctgagtccttttgagttagaagatctgcaaaagacggtttcagatgataagacagatcctgatcttgttcgatcagccttacgtgaagctgtttttaatggcaagaccaattggaattatattcaagccatcttgcgaaattggcgtcgtgaagggattagtacattacgccaagttgaagaaagacgcaaggagcgagaacaagccaatccagccaatgtaaccgtttcagacgattttttgtctgctatgaatttatggagtgattctgatgccagataagaagagagaagtttccctttctcatcgtttacaggaagtagcaagctttgtgccaaaaggtgcaaggcttcttgatgttggcagtgatcatgcttatttgcccatttacttacttgagcaagggctgattgactttgctgttgctggtgaaattatcaagggtccctatgaatctgctgtggctaatatcagtgaatcaggattgtcaggccaaattgctgttcgtttagctgatggtttggcggctcttaatgataatgatgatattgatcttattaccatttgtggcatgggcggtcgtttgattgccgatatattagcagctggtagcgataagttaaattctgttaaacaattaattttacagcctaataattgtgaagatgacttacgttcttggctagtagccaatgattttatgattaaggctgaaaaaatggtaaaggatagacacaagtattatgaaatcttagtggttgaaaaaggaaagataactttgtcagataaagacttgcgctttgggccatttttgcgacaagaacggtcgtctatctttaaagaaagatggcggaaagaattggctaaattggaattggctctgaccagggttcctgctaaaaagaaagcagacaacatgttccttagcacaaaaatcgagcaaattaaggaggtgctctatgaaagctagtcaaatcattaaacgttacgaaacttattgtccgcaggacttgtctttggaaggcgatatatcgggtctgcaaattgggacactggataaggaaatcaagcggcttatgattgctctggatgttcgggaaacaactgtagccgaagcgattgaaaaaaaggtagatttattgattgtcaagcatgctcctatctttcgtcctttgaagaatttagttgagactgctcaaaatcatatttattttaatctcattaagcatgatattgctgtttatgtcagccatacaaatattgatattgttcctgatgggctcaatgattggttttgtgatttattggatatcaagaacagaagaattttgagtccaagtaaagatgattatggtattgggcgtgttggagatatttctcccctctcttttgaagatttggcaaaaaaggttaagaaaatttttaatttggatagcgttcgtttggtgtcttatggtgagaataatcctttaatttctcgtgttgccatttgtggcggcagtggtcagagtttttatcaagaagctctaactaaaggagctcaagtttatatcacaggtgatatttattaccataccgctcaggaaatgttaaccaatggtctcttggctttggatcccggccatcatattgaagtcttatttgttaggaaattggccgaaaaattccaaacatggtcctgtcaagaaaactgggacatcactattttagaaagtcaagttaacaccaatccgttttatcatttatgattggttaatagaaaaaggaaacttttatgaaaaaagttgctattattggagcaggtatcgtaggtgcaacagctgcttattacttatctaaagaaaaagatattgctgtaacggtctttgatgacggattcggacaggcaacgaaagcggcagcgggcatcatttgcccttggttttccaaacgccgtcataaagcatggtatcgtttggcgcgtttgggagcagatttttatcaaaccttgctttccgatttaaaaagggatgcttgtaaggttgacttttatgaacaatctggtgcttttctcttaaaaaataaagcagaaagcttagatgagctttttgagataggtcaaaaacgcaaaagtcagtctcctctcatcggccatttagaaattcaaaaacgagcagaccttacaggtctattagcagatcttgtcggttttgataggtgtatttatgcttctggtgctgctcgtgttgaaggtgccagtttaacagaagcacttttaaacgccagtcatgcgaaaatggttaacaagaaagtaggacttcaagtgttatcagatggtaactatagggttaatggcaaaaaatatacagcagtattacttgcttgcggtgcttggttaccgcaaatattagaaccactcggttataagattgacattaggccacaaaaagggcaattacgtgattacttttttaatagcgaagatacagagaaatttccagttattatgcctgagggtgaagttgatatcattccttttgctcatggaaaagtgagtgttggggccagtcatgaaaatgatcaagggtttgatctgcaaatcgataacagtgttttggataaaatggaaaaggaagcgcaaacttattttccaaaattaaaagaggccacttcaaaaaatgagcgagtaggaacacgagcctatacccgtgattttgcccctttctttggccgagtaactggcttagccaatgtttatgcagccagcggtctaggatcctctggtttaacaacaggtcctttgattggcaatcaactagtaaagatgctcttggataaagaattagacatacaggccagtgattacagtcctgataaatatatcgttaagaatagctagtgacaccgttaacaaaaaatgataaaatgaaagatgattataaatataaaagaggagacctagaatgaagggaattattcttgcgggcggctctgggacgcgtttatacccattgactcgcgctgcttcaaaacaactcatgccggtttatgataaaccaatgatttattatccgctttcaaccttgatgctggcaggaattaaagatattttgattatttccacgcctcaagatttacctcgttttaaagagttgcttcaggatggttccgaattcggcattaagctctcttatgctgagcaaccgagtccagatggtttggcacaagcctttatcattggagaagaatttatcggtgatgatcatgttgctctcattttgggagataatatttattacggtccgggtcttagtcgaatgctacaaaaagctgccagcaaagaaagcggtgcaactgtctttggctatcaagttaaagatccagaacgctttggcgttgttgaatttgataatgacagaaatgctatttccattgaggaaaagccagaacaccctaaatcacactatgcagttactggtctttatttttacgacaatagtgttgttgatattgctaaaaatattaaacccagtcctcggggagaacttgaaattacagatgttaataaagcctatcttgaccgaggagacttatcagttgaagttatggaacgtggttttgcttggctagatacaggtacgcatgaaagtctactagaagctgcgcaatacattgaaaccgtacagcgtatgcaaaatttacaagtcgctaatcttgaagaaattgcttatcgtatgggctatatcacagcggaccaagtacgtgaattggcacagcctttgaagaaaaatgaatacgggcagtacttgctccgtttgattggagaagcttaaaatgactgaagaacaattttttggcaaggaattagcagcatgcaagattgatgctattcctggaatgattgaatttgatattccagtccacggcgataaccgcggttggtttaaagaaaattttcaaaaggaaaaaatggtgccgctaggttttccagaaagcttctttgcagaaggcaaattgcaaaataatgttagcttttcccgtaaaaatgttttacgcggtctgcatgcagaaccatgggataaatacatttcagtagcggacgagggaaaggttctcggttcttgggttgatctgcgtgaaggcgatagttttggtcatgtttaccaagcagttattgatgcttccaagggtatctttgttccccgcggtgtggctaatggtttccaagtcttatctgacaaggtttcttacagttatctcgttaatgattactgggcgcttgaactcaaaccaaaatacgctttcgtcaactatgctgattcaacattaggaattgaatgggaaaatttggaagaagcgcaagtctcagaagcggataaaaaccacccgttgctcaaagatgttaaaccattaaaagcagaagatttgtgatgtttgaaatcttcttagagattgcaaaagagctcaatcagatgtgaactacatcgctattaatgggtactgttggtctggaagatcggacaggcagattatggcaggcgcgtgttgtagatattcatgtacccagtaaccctcgtggttgggaggtgcctgatgaggaacagatttaccgaacggttgagttgaccgccatgagcatgaattttagaaaaacggtctttctgtagaatttggtgggctccattccctgcctagttttgcaggccttgccttagaagaattagaagaactagagattaataaggactcttatcgagctgataaaatcaatcgcaaagacttgcaaaaattgattacttgaaaaaagtactagagaaataaggcgagtttacgtcatcaaaattggcgagcgatagcgagtcagagctatgtgtcgtcattctgatgaaaagaaacataaattagaaaggagtgttcagtttatctttctaaattgaacacggggctaatttcctatgaaaaaagataatctttcctagacgcaagagtctttgtcagatttcctatttttctacggaaattttcagcaagctgaatcgcccctttgtatcttaatatatgacagaatataaaaacattatcgttaccggtggcgctggtttcatcggttcaaactttgtccactacgtttacaataatcacccagatgtccatgtgactgttcttgacaaactcacttacgctggtaaccgtgctaaccttgaagaaattcttggcgaccgtgtagagttggttgttggggacatcgcagacagcgaattggtagataaattggctgccaaagcggatgctattgtccactatgcagctgaaagccacaatgacaattcactaaaagatccatcaccatttatttacactaactttgttggaacttataccttgttggaagctgcacgcaaatacgacatccgtttccaccacgtctcaactgatgaagtttacggtgatcttccgctacgtgaagatttgccgggccacggtgaaggtccgggtgaaaaattcacagctgaaacgaaatacaatccatcatcgccttattcatcaaccaaggcagcctctgacttgattgtcaaggcttgggtgcgatcttttggtgtgaaagcaaccatttccaactgttcaaacaactatggaccttaccaacacatcgaaaaattcattccgcgccaaattactaacatcctgtcaggtatcaaaccaaaactctatggtgaaggtaagaacgtgcgtgactggattcacaccaatgaccattcaacaggagtttgggcaattctcactaaaggccgcatcggcgaaacttatctcatcggtgctgatggtgaaaagaacaacaaagaagtgctcgaacttatccttgaaaaaatgagtcagccaaaaaatgcatacgaccatgtaacagaccgtgcaggtcatgatcttcgttatgccattgattcgacaaagctgcgtgaggagcttggctggaaaccacaattcactaattttgaagaaggcttggaagataccattaaatggtatactgagcatgaagattggtggaaagctgaaaaggaagcagtcgaagccaactatgccaaaacacaaaaaatacttaattaaagataaataagaggctgggacaaaagtcctgcctctttgattttttctctagatttagattgatgcggtgatttattggtggttcttatcccttgtgctatctaatcctatatgaacgtcagcccatgtcaatccttaagcaactatgcggaggtggtatagaaatatagtggataatttttatctgatccttaaaatggaagagcgaggaaaattgaaaaagacttctcagacaagaggctttagggcattttttgatataataagaaaaaagattaaaaaggaagatggtaaatgacaaaattagcaacaatttgttatattgataatgggcgcgagcttttattgatgcatcgtaataaaaaaccgaatgatgttcatgaaggcaaatggattagtgtaggtggaaaattagaaaaaggagagagtcctgatgaatgtgccagacgtgaaatttttgaggagactcatttaattgtcaaacaaatggattttaaaggcattattacttttccagatttcacaccgggtcacgattggtatacttatgtgtttaaggtaagagattttgaaggtcggttgatttctgataaagacagtcgtgaaggaacgttggaatgggtaccttataatcaggttttaactaagccaacatgggaaggcgactatgaaatttttaaatggatcttagaagatgccccctttttctctgccaaatttgtttatcaagagcaaaagctagttgataaacatgtgattttttatgaaaaatagagttgcttgattgatagagataaagcgtattgatttgggtacaaactgatcaaatatggaggtttttttgtgaataaaaaaagtgaaaaatttaatctttcttggttttttaaatggttcttggataataaaaccgtaacggtcttattggttttacttttagtttttttggatattcttgtttttaccaagattagttctatttttaaacctcttctttcttttttagctgttatcatgttacctttggtaatttcagccttactttactaccttttaaagcctattgtggattttattgaaagacggggaactagccgtgtgatggctattacaattgtctttgttatcatagcagggcttcttgtttggggcatagccaatttttttcccatgcttaatgagcaactaacctcttttattaaatacttaccaagttatgtcaggtctgtagatgctcaggtttcaaaattgttgaggaacgatttgctggctagttttcgaccgcaaattgaagatgcagtaactaattttagccagaaggctgttgattatgcggaaactttttctaaaggagcagtaacttgggctggaaattttgcatcgctaattgcacgtgttacagtagctattataatttctcctttcattgttttttatcttttacgtgatagcagtaagatgcaagaagcttttgtatcttatttgcctactaaaatgcgtcagcccattcatcgtattttgggagatgttaatcggcagctggctggttatgttcaaggtcaagtgactgttgcgattattgttggttttatgttttccattatgttcacgattattggtttgcgctatgcagtgacctttgggattatagcgggatttttaaatatgattccttatctaggaagctttttagcaacgataccagtttttattttggctctcgttgaaggacctgttatggtggtgaaggtagcgcttgtttttattgttgaacaaaccattgaagggcgctttgtctctccgcttgttcttggcagcaaacttagtattcatcccattaccattatgtttattttattgacagcaggctcaatgtttggtgtttggggagtttttttgggaattcctgtttatgcatcaattaaggttgtcgtcaaagaaatttttgaatggtataagcctattagtggcctgtatgagaaagaagaggaggatattaagaaagatgttaaatagtgaaaaaatgctgacagctattcaaaatcaagatttagaacaagcccaaaaatattttgaacaagcactgacagaagatgacgatcaaacacttttagctttagcggattatttgcaatccattggcttttatccacaagccaaagagatctttttgcaattacgggcagattttcctgaggttaatatcaatctggctcaaattgctaacgaggatggtcacattgatgaagcttttatgtatttagatgttatcaaacctgatcatcccgattatttgacagcattgttagttaaggcagatttgtatgatacagaaggattaacagaagttgccagagaaaaattattagaagctagccaaattagccaagagcccttggtcatctttggtttagcagagattgaaatgaatttatcagattttcaagcagccatccagcattatgctcaattggataaccgtgcgattttagaagagacaggtgtttctacttatgagagaattggacgtgcctatgctagcttaggaaagtttgaaacagctattgaatttctcgaaaaggcagtagaaattgaatttgatgaaacaactgtttttgaggttgcaactttactctatgatcaagaagaataccaaagagccaatctttattttaagcagttagacagtatgaatcctgatttcgcaggatatgaatacaattatgctctttcgcttcatgcagaacatcaaacgaagcaggccttgcgtatgctgcaacagggattatcaaagaatgaatttgacagtcagctcctccttttagcttcacaattatcctatgaactacatgataaaaaagccgccgaaaattaccttctgaaagttttagaaacagcagaagatgatgaagaagcccttatgagacttagcaatctttacttagaagagaatcgttttgaagatgtgatcaatttagacagagcagatattgatagtgtgctgacaaagtggaatatagctaaggcctaccagaaacttgaagctgacacaaaagctcttgagatttatgatactttaatcgtagatttggctgataatccagactttcttaaggattatatctatattttgcgaaaattcggttatgatgaaaaagttaaaacttttgccgataaatacttacaattagtacctgatgataatgatattgccgatttgcgagagcaattgcagtaattcttcaaaaatgaaattttaattttgaaagagttttcattttttagttaaaaaactcacaaataaaagttcacaaagtcttgaaaaatctgtggtataattgacatgaaacttgtgaaagaaggactttttatgaccgaaataaataaggaagactatggggctgacctgattgtagacagcctcattaatcatgatgtcaactatgtttttggaatccctggtgctaaaattgatcgtgtctttgataccttggaagataaggggccagaacttattgtagcacgccatgagcaaaatgctgcttttatggctcaaggaattggccgtattactggtgagcctggtgttgtgattacaaccagcggtcccggtgtttccaatctggcgactggtcttgttactgcgacagctgagggagatcctgtccttgctattggtggtcaggttaaacgtgctgatttgctcaaacgggctcaccagtcaatgaataatgtcgctatgctcgatcccattaccaaatattcagcagaaattcaggatcccgcaacactttcagaaaatattgctaatgcctatcgtttggctaaagcaggaaagcggggagctagtttcttatctattcctcaagatataactgatagtcctgttactgtcaaggcgattaagcccttgacagatcctaaactaggttcagcgtcagttgctgatattaattatttggcacaggccataaaaaatgcggttcttcctgtcttacttttaggaaatggtgcgtcaacggctgcagttacagcttctattcgccgtttgttaggagctgtcaagctgccagtcgttgaaactttccaaggagctggtattgtttcaagagatttagaagaggatactttttttggtcgtgtggggctttttcgtaatcagcccggagatatgttgctgaagcgttctgacttagttatcgctattggctatgatcctattgaatatgaagcgcgcaattggaatgctgaaatttcggctcgcattattgttattgatgttgctccagctgaaattgatacttatttccaacctgaacgtgaattaattggtgatatagctgaaacacttgatttactcctacctgctattagtggctactcacttccaaaaggttctcttgactatctcaaaggccttcgtgataatgtagtagaagatgtcaaatttgataagacagtcaaatccggtctggttcatccgcttgatgtgattgatgtccttcaaaagcaaacgactgatgatatgacagtaacggttgatgttggcagccattatatttggatggctcgttattttaaaagctatgaagcacgacacttacttttctcaaatggtatgcaaaccttaggtgttgctttgccttgggcaatttcggcagctcttgtacggccaaatgagaagattatttctatttcaggtgatggtggtttcctcttttctggccaagaattggaaacagctgttcgtttacatttaccaattgttcatatcatttggaatgatggtaaatataatatggttgaattccaagaagaaatgaaatacggccgttcagcaggtgttgattttggtcctgttgattttgtcaagtatgctgatagtttcggtgctaaaggttaccgtgctgatagtaaagaaaagtttgatcaagttcttcaaacagcactcaaggaagctgaaaatggtccagttctcattgatattccaatggactataaggataatgtaaaattgggtgaaactattttgcctgatgaattctactaaaaaggagtttaaaatggaaaccaacaaattatttcaatataataccttaggagcgcttatggcaggtctctatgatggttctttaactgtgggtgagctgttagaatatggagatttaggtttaggaacacttgattccattgatggtgaattaattgtcctagatggtaaagcttatcaggctaaaggatctggtgataaaccagaagttgttgaagtgcctgatgatatgaaagtgccttatgcagctgtcattcatcatgaagcagaggttatttttaagcagcgttttgaaatgacagataaagaattgcaagaacgtattgagtcttactatgatggggagaatctctttcgttcgattaaaattcacggaacctttgctaaaatgcatgtacgtatgattccgcgttcgacccctgatgagaaatttgcagaagtggcaacacatcagccagaatacagagctgaaaatattaccggtactattgttggtatttggacgcctgaaatttttcatggtgtcagtgtggctggttatcatttgcactttatttctgatgatcatacttttggtggccatgttatggactatgttatttcagaagggcaggttgaagtgggtgctgttgatcagttagatcaacgtttccccgttcaagatcggcaatatctctttgctaaatttaacgccaaagatattcgtggtgatattgacaaggcagaataaaactggattataactttaaaaaagagctaaggacttataaaccttagctctttttgacttgactagcgatctattgttttttaaatttaaacttactgtagaaactaaaggcagcaatccaaatagttgctccaatggctccgatataggttgagtcctgtaaaaacaaagttataaaaacaaagaccataaaaataattgtgataggatttaaaattttgtaatgaggcattaaatagccatctgccataaaatcatttgatttacgatatttcaggtgagccagcatggtcaaaacataaatagcaatgtaaacaccagaagaagacgcagtaatcaaagcaaaagcgtcttttattccaggcagtacattgataaaagctgaaatagcaataacaatagctgagaaaataatggctttacttgggacaccagtttttgaaagtgttccgattttgaagcgtttcataaattgattaggtgcttcattagctaattgataaaggtgacgaccggttgaatagagtgtcgagtttagagcagacgctgcggaagttagcacaacaaagttgattaaggcagccgcccatttgatacccgccagtttgaagaccatgacaaatggtgatgtatctgatggtaatgctctccatgggaaaatggtcataatagcaattaaggcaccgacataaaaaatcacaattcgcattggaatttcttggatagcttttggtaaaacctttctgggattttgtgtctcggatacggtaatcccaacaaattcaatagcctgataagcaaagaagaccatttggaaagacatgagaaatttcatccaaccattgggaaacatttcaaatcccttagaaatattggcaaaactaactggtccctgactcgttttaaaaccagtcagtaacatgaagatagctgttgcaatcaatgctaaaatggcaatgattttaatcatggcaaaccagaattctgcttcgccaaaaacacgaacagcaattaaattaacagatcctaatattaaaagaaaaacaatctgaattatccaagcaggccaagatggaaaccagtactgaacatatttggcgatagctgtgatttccgccattcctaagaaaatgacagacacccaataggaccaacctgcgaaataaccccattctttaccaatgtatttggtaataaaattgataaaagtatgctgatcaggatcatggtaaagcatttcacccatcgcacgcatcatccaaaacatgaaaagtcctgttaagagataaacgatgatgatggaaggtcctgttaatgaaatggaacgccctgctcctaaaaaaagccctgttccgatggttccggcaatggcaatcaattgcacatggcgattttgtaagccacgaaccatgccattctcaagctctttcggattttgtgttgtattttttgcattttgatgtgacataattccaacctttttaataatatcttttttattataatattattttatcaaaagcacaaattggtcatagctgaataagaaattccaatcattggatgatgaacataatgttcctcgtttttgatagtgctttccaagatttatggacttaagagaacttagatttcttgaaaacagtgactagagagtgttaactttactagaaaagctttaagatagctgataatatgtgattcaaaggtttggtagcaataactttaaccaaatagataatgcctgaaataaaattggaaaaagtaaaaaattacatcttcatcgcttttatcttagcttcattaggcgttacgcgcaacgttttttgtcccctataagtgacaaaaccgggtttggctttgctgggtttgttgagctttttagcttcaatcatatcaacttggacaagattggaaaggcgagcctttgaaaagtaagctgctaattcggcagcatccgttttaatttcgtcgctagggttaaggttatctttaatcaaaacatggcttcctggaatgtctttgacatggaaccagagctccccttttttagacattttaaaagttagctcgtcattttgaaggttattctttccaaccagaatgatggttttgccatcagaagctaagtaaggttcaggttttttgcgtttttgaattttttcacgatggcggcgcttgacaaaacctgtttgaaccagctcttcacgaatttcgctgatttcagacaggctggcctgattgagggcattgtcaacactttctaagtattgaatagtagcctttgtttcgctgatgaggctccctaaatgcttcacagcttcttttaatttttgatattttttaaaatagcgttgcgcattctgactaggtgtcaaggctttattaagcggaatgcttactttttgtcccgtataataattatccagttcaacactgtcctgattgttagggacctgattaagataagtggtcaaaagttctcctttttggcggaactcttcagccttatctgtatcttgcaattcttgctcttgctttttgagttttttcttgtttttctctaattcattttgaatacgatggataagatcgctggcttgctgtgcaattctgtcgcgttcagccttatcttgatagaaatagtcaagcagatctgacaggctaccaaaggtttcttgggaattgctgaaagtaattgcagtaaaagatttttcagtcaaagttggagaagttggcgagtcaaaaaacagtttaaagtttttgaatgtgtcagtttttaatctttggctcaattcggcagccgtgtcgcgtcctaagccctgaaagagtttttgtaaattattagccgctaaatcttctgtttgtaggatttcaaataatgtttcatcagaaatggtaaaagggttttgggcctgtattttcggtggtgctaaatatcttgagccaggtaaaatagtgcggtaactgttttgagtgaagccaatgtgtttaatggattcagtaatttttccttcatttttatctaaaagaataatattactgtgcttccccatgatttcaataatcatagtaaccttgatttgatcaccaatttcatttttattggaaatgctcatttcaagaatacggtcattttcaatttgttcaatgttttcgataagagctccttgcagatactttcgcataatcatagtaaaagtattagggctttgaggattttgaaaatcggtcttggttaattgaacacggccaaagacagggtgggctgaaagaagcagtttataattttgcctgttgttgcgaatcgtcaacactagctcttgttcgaaaggctggtttactttctgaatacgcccccaaagaatctgttcttgtaattcctttgttaaatgatgtaaaaaaaagccatcaaaagacatgattttccccttttcttttagttcttttattataccatatgcagacttaaatcatttcctaaagtctttaaagttattatctgctatattgaaaaaagctgaaaattacagtaaaatagaaacagtaacttagtgaatttgagagagttaaacagacaattttttggcttgtaagcgtgggaaagctttttttgttagcagcaggttagattttgatcatacttaagctattctcattgacattcattattgggaggaaatatgaaaaataaacgtttattgggcgttttattggctctagctgtacttgttattggtattttagtttaccaatccgttgacaaacaaaataggaagaattcacaatcgggaacttttaaagttggtgtgctccaatatgtcagtcacaatgcgttagatgagatttatcgtggtattaaggctggtcttaaagaagaaggttattctggcaaaaaaatcaaaattgattttatgaatgctgaaggtgatcaaagcaaagtacaaaccatgagtcagaccctagtcaatcataaaaatgatgttctcgttggtattgctacaccagcagcacaaggattggccagtgcaaccaaaaagacaccaattattatgggggctgtgactgatcccgttggtgccaaattggttaaagatttgaaaaaaccaaatggaaatgtaacgggtgtttcagacaagacaccaatcagtgatcaagttagtttaatcaaaaaattaacgccagatgtcaaaacagttggtattctctattctagcagtgaagataattcaaaatcccaagtggaggaatttaaaaaaattgctgagaaaaaaggctacaaggttctggaatattctgttccttcaaccaatgagattgcgactacaatgaatgtgatgctggataagacagatgctgtctggattcctttggacaatacaattgccagtgcctttccaacagtggtatcagcggctaaaacagctaaaaaacctatctatccaagtgttgataccatggtaacagaaggtggacttgcttcggttgttgtcgatcagtataaattgggtgttgctactggtaaaatggctgttaaagtgtttgaaggtaaaaaagtttcacaacttcctgttgatatttttgataagggaaccccagttgtgaataaaaaagttgcgaaagagttaggcattgatatcccatctgatattttgaaaaaagcaaaacagcaaaagaatcaatgaaaattggactttaataaggagtggaataaggagtggaataaggaggaatctctcaaagaggtttttgtccccctcctttttttgtgttaaaatagaagatattacaaaagaaggggacgataatgttactttcaaccatttctcaaggttttctttggtccattttaggtttaggtatttttatgacctttcgcattttaaattttcctgatatgacgacggaaggttcctttcctttaggaggagcagtggctgtgagtttgatcacacagggaatgaatcccttattagcaactattattgcaagtttgtcaggctgtctggcaggactagcagcaggacttctttatactaaagggaaaattcccacgcttttatcaggaattctggttatgacctcttgtcattctgttatgttgatgattatgggacgggcaaatttaggtcttttagatgctaaaaaattacaggatctcttacccttttcaggagagattaatctccttagtttaggtcttatttttgtttttcttgtcgttagcgcgatgattttctttcttaatacacgtctgggacaagcctacattgcaacaggtgataatcatgatatggccaagagttttggcatacatacagataagatggaattaatggggctcattttatctaacggtattattgccttatccggtgctctgattagccagcaagatggttatgcagatgtttcaaaaggaattggtgtcattgttattgggttggctagtattattattggtgaagttctcttttcgacgagtctaacgttattggagcgtttattagctattgtcgttggttctgttctttatcaattcttgattttagctgttatttcaatgggctttaagaccaactatctcaaactcttcagtgctttagtcttggctatctgtcttatgattccagagctgaaaaagaaattcttcaaaggagtgaagttatcacgatgactaaaattgttgaattaaagaatgctacggttcaagttaacaatggctttgatgattataagacaattcttgatgatgtcagtttagatatatacgaacgtgattttttgaccattcttggtggaaatggagcagggaaatcaactctctttaatgtccttgctggcacactgtctttgactgacggcagcatttctattatgggagaagatgtcaccgcctatcctgctgaaaagcgagcaaaatatctatcgcgtgtctttcaggatcctaaaatggggactgcaccaagaatgacagttgcggaaaatctcttaattgccaaataccgtggtgaaaaacgtggacttgtctcgcgccgcattagtgcttataaagaagagtttcaagcagtaattgataaaattggcaatggccttgaaaagcatctagagaccccaacaggcttgctatcaggtgggcaaagacaagcgctcagtttgcttatggcaaccatcaaacgtccagagcttttgttacttgatgagcatacagcggctctggatcctaaaaccagtgttgctctaatgacactgacagaagaattcgtgaaacgtgatcatctaacagccctcatgattactcatcgtatggaagatgctcttaaatatggcaatcgcctcttggtaatggaagacggtcgtattatccaagatttatcggccgaagaaaaagcaaagatgaacatttcagactattacggactgtttgaataaattgaaaaaactggcgaaaagttgtatactaacaatgtatgcaattttttattgcccgcagtcattcgacttgctaagcaagaaccgtatgtatgaaagtattattatagtgaaagaatagccaaactgctggttggtacgataatctgatgagatatatttcatcagattcattcgttaataatgagataagtctgacactaaaattgaaattcaaaacctataaaactaatgtaaggagacataatgagtgacattaaaattattgccctaggcggagttcgtgaaaatggtaagaacttctatgtggtagaagtcaacgacgccattttcattcttgatgctgggcttaagtatccagaaaatgaacagttaggtgttgatgttgttattcctaatctggattatctgattgaaaataaaaagcgtgtacagggaatttttttaacccatggacatgctgatgctattggtgctttgccttatttgttgagtgatgtcaaagctccggtatttggttctgagttaacgattgaactagctaagttggtcgttaaaaacaacgatgcaactaagaaattccataatttccatgtggttgatgctcaaactgaaattgaatttgacgatgctattatttcttttttcaaaactacccattctataccagaaagtttaggaattgtagttggcactaaagaaggcaatattgtttatacaggtgattttaagtttgaccaagcagccagcaagctttatcagactgacttagctcgcattgctgaaattggacgtgaaggtgttctggcacttttatcagattctgctaatgctgatagcactgttcaaattgccagtgaagctgaagtaggtattgaaatggagcaagtcatttccaattgggaaggacgtattatcgtcgctgcagtagcctctaatcttgttcgtatccaacaagtctttgattcggctgctaacaatggccgccgtgttgtgctgacaggttatgatgttgaaaatattgttcgaacagctatccgtcttaaaaagctttctctggttgatgaaaaacttattgtcaaaccaaaagatatgcataaatttgaagatcatgaactaattattttagaaactggtcggatgagcgagccactcaatggtttaagaaaaatggctattggccgtcatcgttatgttgaaattaaagatggtgatttggtctatattgtaacaacacctactgtttctaaagaagccgttgttgcgcgtgttgagaatatgatttataaggctggcggtgatgtgagactcattactcaggacttacgcgtatctggccatgctaatggtcgtgatcttcaactgatgattaatctgcttaagcccaaatatctcttccctatacaaggagaatatcgtgaattagctgcccatgctgatttggctcttgaaataggcatgtttccggaaaatatttatattatgaaacatggtgacattatggtttatgataaagaggatggtttcttacatgaaggcggtatcccggctggagatgtcatgattgatggcaatgctattggtgatgttggcaatattgttttacgagaccgcaaggtgctttctgaagatggtatctttatcattgccttaactgtcaataaaaaagaaaagaaaatcatttcaagagctaaaatcaatacacgtggttttgtttatgtcagaaaaagccgtgatattttacgcgaaagtgcagatattgtcaataaggctgttgaaaattatttgcaacaagatacgtttgattggggagaattgaaatctattgttcgtgatgaaattggtaaatttctttttgaacaaactaagcgtcgtccagctattttaccagtagttatggaagttagataaaagaggcttggttgatactgtttccaaatggttggattttttggatagagaaattcaactaaaagagtatgcagttcaatcctagcttttttattaatttctgaaataatgattataatgtactttacaattgggattgaaaagatggtgacagaaagggcaggttcctttttctttgtatgcttcaatagttaattctctttgacaagatccacaaaaaacaaccttatctttttttaatttttctggataagcttgaaaattgtgtgtctcgtgtcgattatgacataaaaaacaagggtagtatttttgacaggcaaaacattttagggcgacaatgtctgtcgggccatgataatcaatgcaccttgtttccttgtcaataagatcaccgtaaatcgtaaccatatgttcctccgcttgttttgttagtttaccaaaaaaagagggattgtgctataatgaaaacaaaaaaaggagatcaaaaatggctttttttcagatagaatacaattccaaaactttagggatggaacgccatgtcaatgttatttatcctgatgcttcagagattaaggaagattatataaatgataccgatattcctgttctttatcttttgcacggtatgggcggtaatgaaaattcatggcaaaagcggacagctattgaacgtctcgttagaaagacaaatcttatcgttattatgccatcaactgatttagcatggtataccaatacagcttatggcttggattattatgatatgattgccaaagagctacctcaaattctgcagcgtttctttccaaatatgacaaaaaaacgtgagaaaacttttattgcgggactttccatgggaggttacggagcttataagattgctctttcaacagataagttttctcacgcagcttctttttcaggtgcacttggacttggaattgatggtcaagacctaggagaaacgacaggagcatctcaaaactattgggaaggcatctttggaaatttacaaggaaaacagttacaggaacattttctgacaacactagcagaaaagtctgataaaaaaaccaagttctacgcttggtgcggttatgaagatattctttatcaggctaatgaaacagctgtgaaaaaattaagaaagatagggcttaatattgactatcgtaacgaccatggcagacatgagtggtactattgggaaaaacagttgaattttcttttagaatggcttcctattgactatcaaaaagaagaacggttgtcctaataatcttaaggtaagtttttctggttttatttgacagtttatttttaagcagttaaaataagagtagaaaatgaaagtgaggattcgatttgtgaaaaagaaattaagtattgtgttagggctgattattgtagctgtaacattttttaccttaactaatcaaaaaacagtaagtgctaattcatctcgtgtagaaacagtgtcctaccaacttcttaaagaaggtgtagctgatgttagattgacttactatcataataaaggcaatgataaggtacttaaacaaacggcggaatcaaaaatcctttattcagcactcaaggtgacagatgctcaagcagcaaaagagaaggttggctctcaatcagagaaatatcaaggtataacaggtgttcaggaaagtgttgcttacaaagatgtctatttgatagaaaaagtaagtgtagattataccaaagctaatcttaatgaattagcgaagaagcttccagaagtaaacattaatactccttcaggtaaaagagcaacttatattagcttaaagcaaagtgaaagatttctcaaaaaacagggttacagcaaagttaaaaatggccattttaaagaattgaaagtgaattaattattagctgacaaataaaaacagcaggcagagtcttaatctgcctgctgttttattacgtgattttcagttcgtctcgttctgctaagtttgagacaagtaaattaaattacctattaaataaagggaccatgattttgaatcaaaaactcttttaggggtgattttttaatagcacactttctgagagtcaacaaacaaacttcaaaaggaagttcgctctgagtctgcaagctattttaagataactcttaattcagtcactattcaaagcctatagttacactaggtaagttgaaatgctgcccataaatacgcgattctaattgactcaattttcctttccattgggattttagtggatattatatacaaatatcgatttattgccaattgcggtaaatccttgctttttactctcttgcctgctatacttaggcgtattcttaaatattatactggattttcaagaatgaaataaatataagaatatttggatcttgcttagtgttatagattaaaaagtgagatgaatatcagaaagttcctgtttttgtctgtcatcctgagttttatgacaagcatagaaaggattatttatgaagactttcattaaaattttgttttttattcctagactaatatggaatattatttggagcatcattaaaactcttattattcttgctgctattatttttgcttttctttattttacaaataatcataaaacagacttggaatcaacgatctccgaacaatggaataagataacgactttttttagtaatgactttagtttgccggatacgatgtctaaattatcaacagataattataaacatgaagcagggagtcgttggagtcaaaatagtgctagtgtttatatagcttctactgataaaactattgttaaggcttaccaaactgctctggctaattggaatgcaacaggaagtttcacttttaatatcatttcggataaagcatcagcagatattacagcaaaggattattctgatgtaaattcgcaagccgctggtttagctgaaacagaaacgaatgcagtgaccaatcgcatgagtcatgttgatgttaagcttaatcgctactatcttttagatgcaagttacggttatagttttgataggatagtccacacagcagagcatgagttagggcatgctataggacttgatcatgatgataaagaaacttcggtaatggcctcatcaggttcctacaatggtattcaaacagttgatataactgctgttaagaagctttacgctaattaaatgtgagtaaaataatagttttatatcgctttattatataaatttaatattattgacatatacgaaacagtctcttgattaattttttatctcattaaactaaaatgataaaattctaaagcttgccaaatacttatttagtaatgatttttatccttggacgctcttgtgaaaaaagagtgtttttaatataattataaaataaaggaaaagttttttaaaaaaatcaaagtattttgtattgaaaatgtaatgaaataatgctattatgacaaagatgtatcatttggctttacattaatttcaatttatcatgaagagggaacatgaaaaagattaaagttatgcttgtctttggtacaagaccagaggccatcaaaatggcgcccctgattatatctttaaaagagcagactgaacgttttgaaacagtaaccgtagtaactgctcagcacagacagatgcttgatcaggtgttagagacatttaagattaggcctgattatgatttgaacattatgagtaagcagcagaccttgtcaaccattacaacaaatgttattaataaacttgatgaagtcttaaagagtgagaaacctgatattattttagttcatggtgacacaacgacaactcttgctgctagcatctctgctttctataatcaaattaaaattggtcatgttgaggcaggccttaggacttggaataaatactctccatttccagaagaagttaatcgccagataacagatgttgtttcagatttgtactttgcaccaactaatcaaagccgtgataatctcttgaaggaaaatcatcctgctcaacatatttttattactggaaatactgctattgatgctcttgatttaactgttaaagagaactatcatcatgatgttcttactaaaattaaatcagataataggattattttagtaacaatgcatcgtcgtgaaaatcaaggagagccgatgagaagggtctttaagacgcttaaatcagtgttagctgattatccagatgttgagcttgtttatccagttcatctgagtcctgctgttcaaaaggcagcaaaggatattctagcaaatacagagcgtatccatctgattgaaccgcttgatgttatggattttcataatctagcaaataagagttattttattatgtcagattctggtggtgtccaagaggaggcgccatctcttgggaagcctgtccttgtcttacgtgatacaacagagcgacctgaaggagtagcagcagggactttaagattagttggtactcaagaagatagtgtcaaaaatgctatgataagtttgctggataataaagaagaatacgataaaatggcccagacccaaaatccttatggcgatggtcaagcttcaaaacgtattttagaagctatttcttattattttaataatggcgcgcggccggatgattttggaacgggggaataattttagaatgaaacgtttgttaaaatttttcagcatgcttttatttatgctattagctgctggattaggtctttatgttgctcttcaatatggtttgcttatcttagaggtttatgcctttcttatttttatggctatcattactccttggtttttaacagacctattagtaacttggaccgaactcttttctattattattggttcatttatcttgtctgtgggtatttcatatatccctttgtatgaccgtttagctttaattttagttttgcctatagttttaattactgctaatcaagtagaagctttgtttttagagaaaaaaggtgcgattgcagttcaaacctctaaggccaaaagctattatgaatactatgctcgtaaggcacagcattctgaggacgtcactattcaaacaatgttggttagttgggctcatgctgaacaatttaagcaaattcagcctaaagagtattatgctagtattaaacgcattaatcgtgccatttttaaatccaaacatgacagtgaccgtgttttttatttgagaaatggtttgtttcttattgttcaaataaattcagatcccaactggcatcgcgggatggaagaagaggttagtatcaatcttagcagtttgcgtttcaataatgaggcaactagccatgaaattcagttccaatatggttatcaattagttaatcatgataattgggaacgttatgcttattatgaagatatcctcaaaaggctggaacgtcttttggaaactcatattattgtagaatattaggtaagtggagattatgaacttaacaaacttattttttaacattggtcttggcatcagtctcttttttgcggcctgttttgtcaccttgtttattagttatttagttattttagaaagagttaataaaaattttaaggcggtggatgatgatgagtcaaattctaatgattattagtttaatttcgatttggtcttccttagctatggcattgatcatccttatgtcagcagtccatttttggtttaagcacagtgattttgatgttgatactagccctttgccagaatatccgatggtgacagttgtggttccagctcataatgaagatgttgtgattgcacagacagcaaaggctattttggatatgaagtacccaagggataagcttgaaattattctttttgctgataactgtgaagataatacgtatcaggaaatgcaaagcattaaagctttgccgcaatatgctgatcgagatttgactctgattaatcgtagtggtactggtggaaaagctggtgtcttaaatgatgctttgaagatagctaaaggtgattatatctgtgtttatgatgcggatgccatgcctgaaagaaatgctctttatttccttgttcaaaaggttatggaagatccagaacgtcatgtggcagcttttggtcgaaataagacgcgtaatgctaatcaaaacttcctgactcgttgtattaatcaggaaatcgttgttacccaacgtatccaacatgttggtatgtggcatttaggaaaaattggacggattcctggtaccaactttattatcaatacggaatttgttaagagtatcggcggctggagaaatggtgccctgacagaagatacagatatctcctttaaaatcatgcaaagtggtaagttgattgcccttgcctataattcagaagctttccagcaagaacccgaaacgctgaaatcttattatttgcaaagaaagcgctgggctaaaggtaactatgaggttgttattgccaactttaaacacctttttggccgtggtaattggcgtgtcaaatgggaagtcttctactatacttgtactttcttttggtttaatgcagccattgtgttatcagatatcttgtttttctccaatttgattgcattaattattggtctatttaagccaggtgtgcaggttccctttgcttttgatgctaataatatttacatggcacagcttttactctttaactggttcttgatgattttgctttatctcttgcaaatttccatttcacaggcgactcaatatggtcaggcaaccgttaaacaaatttggattgccttattggcttactttacttatacgcagctctttattattgtatccatttcatcagtagcttctgttatgatggataagattttacatcgtgaaggaaccaaatgggttaaaacaaaacgttttgcaggctagaggagaagaaagtgaaaaaaaagaaattaaaatacatttggcttatacttttgctagcaacactggctgtaggattttattttatccgagtgaaaagtactaatgatatgcaaaggaatacctataaaaattggtctaaatattatgttgtaactcatggaaaaagtgcttatgtaaagacggctactagtgatgaagggacaactgctctttctgaaggacagggttatggaatgtatattgccattaaagctgctaagaagggcataacaactaagtcccaatttgctaagctctacaaatattatatgaaccatcgcactgccaacacgcagttaatgtcttggaaacaaaatattaaaacagatggttcaattgaggatttgtcaaacagtgcaacggatggtgatctgtatattgcttatgccttgattaaagcatcagagctctggtctgatcaagctgatacttataaaaaacaagctaggttgcttttaaaggatattttaacttataattacaattcagagacgaaatccttgactgttggtaattgggctgttaaaggaactgattattacgatctcgtccgcacctcagatatactgccagaacaatttgatgttttttatcagtttagtaaagatgagacttggaaaacgatcaagacttccatgctagctagtttagaaaaaatgagccgtcagcataaaactggtctcctgccagattttatgtgggttcgtgaatcaggtgagataaaggctgccaaggctaaccttattgccagcaaatatgatggtgattactactataatgcctgtcgtatgccctataatttagctaaaagcaatgataaaaagagccaaaaaatacttaagaagatgatgaatttcttcatgaccgaaaagaccatctatgcgggttataagctgaatggggaacggttggatagtcatcagtcggctagttttgatgctccaattttctatgcagctaagaaattaaaccataagtatgagcgtttacatcagcaagaaaagaaagtttttgtcaagggtctgtcatcaacaaactattatgactcagccctaacaacgatggctgttttggatcaataaacaatgtaaaaaggataactgcggttatcttttttactatctcaactagcttagtcagtcgagatctgatacaatagaattatgattattttacagggaaacaaattagagcgctcattttctggtgatgtgctctttgataatattaatcttcaagtagatgaacatgatcgtatcgccttggttggacctaatggtgctggtaagtctacactcttaaaaattctcgtgggtgaagaaacagcaacatcaggtgaggtcactctcaagcgtgatgtaaccctgtcgtatttggatcagaatagccgttttaaatctgataataccatttatgatgaaatgctccatgtttttgatgatttacgtgcgactgagagacatttgcgctctatggaagggcaaatggcagagttggtcggaaatgattttgataaactcatggctgattatgaccgcttatccgaatccttcaggcagcagggtggtttcacttatgagagtgacatcaaagctattctcaatggttttaaatttgatgagtctatgtggcagacgaaaattgctgaactctcaggcggtcaaaacacgcgcctagctttggccaagatgcttctagaaaaaccagaactgttggtattggacgagcccaccaatcatttggatattgaaagcatttcttggttggaaaattatttagtcaattatcaaggagctttaatcattgttagtcacgaccgttattttcttgataaggtagcgacagttacgcttgatttgacccctcactctctagatcgctatgtgggaaattattccaaattcatggatcttaaggctgaaaaaattgccatgaaagagaaaaattatgagaagcagcaaaaagaaattgctaaattagaggactttgtgcagcgcaatattgttcgtgcatcgacaaccaagcgggcacaggctaggcgtaagcaattggaaaaaatggagcgattggataaacccgatgccagtaaaaaatctgccaatatgacttttcatgttgataaagcctccggaaatgaggttttaaaggttactaatgcagctattggttatgatgacaagatattagcgcagcctattgatctagacgttagaaaaatggatgcccttgctatcgttggtcccaatggtattggcaagtcaaccttgctcaagtccattatggggcaaataccatttattcatgggagctcagtttatggctcaaatgtacaagtcggttattatgaccagacccaatccaatctgacagctagcaataccgttttagaagagctttggtcagcctttccaaggacagcagaagtggatattagaaaccgtttaggtgcttttctcttttcaggcgacgatgtcaaaaaatctgttgccatgctgtctggtggtgaacgcgcgcgcttgcttcttgccaagttatccatggaaaacaataattttctcattctagacgaacctactaatcacttagatattgacagtaaggaagtgttggagactgctcttattgattttaatggcactcttctctttgttagccacgaccgttatttcatcaaccgcgtcgcgacaaaagttctcgaaatctcccaaaatggttccaccctttacttaggtgattacgattattatcttgaaaaaaaagcagagcgagaagcaaagacagagttccttcaacctatgcagtcaggatccccttcatcctccctggctgccgctacggactatcaagcccaaaaggccaaccaaaaagaagaacgcaaattaaagaggcgtatagccgaaattgaagagcgcttagaaaccattgaagcgcgtgaaactgaaattaatgaggccatgcttactactaatgactttactcaattggccgacctgcaaaaagaactagaaagcgttcaaacagaacaattgggacttctagaagaatgggaagaattgagtaggcagctggaggattgattaaaaaagaggttggggacaaaagcgttccaactcttttaacagtctgttggactgttaagcttgtctaatcccataaatgtccgtctatgtcagtacctaatccaccttccgtaaggtaaaaagataaaatagaagtcgtgattgcgttacgacttaccgatttttgttccccctctcgtaaatgttaataaattataatataaagcacagatgttatttatctgtgcttttatcatcttctatttctcaaactccgctttgcttttaacatcgccgtattcttcagcaacctctaagctaagaatgtcctcatagcgaggtagttgaatatcagtgccatacttgttatgtagagctgttgtcacaaggcggtaagctagattagcattacgcgaaagaatgggaccgtggaagtaggagccaaaaacatttttatagtggacgccttcgctgccatcctctttattattaccatttccataaataactctccctaaaggcttttcgtcatcagacaaaaaggtccttccttgatgattctcaaagccgtagtaggtttcgttaaattcatcattatgaatcttgatatcaccaatgtagcgattatctttttgattaagcgtatagtgactcataacaccaataccgtcaatgcggacgccattggcttgaacataatattgtcccaacaactggaaaccgccgcagatagctaggacaaccttattattttgaataaagctggcaatagcagagcgtttattaggcaaatccttagcaacaatggattgctcatagtcctgaccgccgccaaagaaaaccatatcatacttgttagcatcaaaatcatcgccgattgagacaatatcaaaagtcattcgtatacctaatttttcaccaacatatttaagcatgagaacgtttccgttatcgccataggtattgagcaaattgccataaagatgagcaaccctgatatcatataagtaatccttgtcagcaggagattgtagagaagtataagtcattaatgcatctcctttcttactgcgtgacggctggctagtaattcgcggaattccaacatggctgtgtaagtagctagaatgtaggcatgatcagcctcttgtttttcaatcatacttagaatgtcttcaagtttttcagcctgctcaatctttgtttcattgtaaccagtaacacgcagacgtctggctatttctgaatggcggacaccacctgtaaagatttgtggaatattcatatctaaaatgctctcaaaattcgcatcccaaatccagctggtatcaatgccatcagcataattggcattgagaaggacagataaggtgaaaggataaggtgctagtttaatcatttctagtgcttgactggcaccaacaggattttttattaaaacaagagtacatgacttatcgccgattttaaaggtttcttggcgtccaaaaacagcacggctcttgtcaaagccagccttgatttgttcaggagttacaccgagaaattctgcaacagcgactgcagccaaggcattatagatattataaaggccgccgacattgatcttataatcctgtccgtcaatgatgaactcagcttgagtgttgctaatcttggttagctgagtcaagctgtaatccagatgaggacggtgaaaaccacagttggggcagatgtagtcgcccaagttggcataagtattaagcttgtattgtaggatatattcgcacttaggacagacgatgccttcagtattgtaatgtgccaagtgagcagcttctttttttgtatcaaaaccatagtaacgcacaggattaacaactgttttggcgttaaagagtgggctatcgccattagctaaaatagttgcttttggcgctttggcagcaccgtccaaaatcatttgataggtagtataaatttcaccgtaacgatccatttgatcacgaaaaatattggtgaaaacaaaaaggctgggctttagataatctgtaattttaggaaggctggcttcatcaatctccagcaccgcaatctttttaccatttctagattttttagcagttaaaaaagttgaggtaattcctgtaatcatattggcaccactaggattagttagcacctgaccgtaagccttttttaaaattcctactgttaaagctgttgttaaggtttttccattagtgcctgtgacaacaacaatgtcataatctttagcaagtgtatctaaaatatctttatcgcacttaagagcaatttttccaggtaaggtagagccgcgccctattttactgagaaaaaagtgtgctgttttaccagctaaaattcctattctcgattttaaagtcatatgaacattttatcataaaaaaagcgtttgagatacagaaaaatcacttgaaaaatgatataataaagaagtatatagctaagtttgatattaaaaagaaagaattgtatgagtagtttatttaacgttaatgcccaattttgggctagtcttattgatagtcctttaaaaattttagttcatattcttgatattgctattgtatcatggttgatttataaatttatcaaagccttagcaggtactaaagtgatgtctttagttcaaggagttgttctatttgttctctttaaatttgtcgcagaattcttaggattcacaacaattgcttttttgatgaaccaagttattacttatggtgttattgccggagttgttatctttgctcctgaaattcggtctggcttggaacgttttggacgaacaccccagtcttttatccaaagacagcagctgagtgatgatgaaaaattagttgccgcctttgtgaaagctgtggcttatatgagtccgcgcaaaattggagctttggtatcaatagaagagactcagaccctaagagaatatattgccactggaattcctttagatgcagatatttctggagaattactgattaatatttttattcctaatacacctttgcacgatggtgccgttattgtggagggaaataagattgctgtttcttgtgcctatcttccgctttcagagtccagtcatatttccaaggaatttggaacgcgccaccgtgctgccattggactttcagaagcttctgatgcctttacctttgttgtttccgaggaaacaggagctatttctgttgcttataaaggtgattttatccatgatttgtcccttgaagcttttgaggtcttattgcgggagcatttcattaaagaagaaccaaagaaaaagaattggatgaagcaattctttggaggacgccatcatgtttaagcggttttttactaaacgtctctggttaactcttgtttcaatcttttttgccattctcttgttcttgacagctaattcagtcaattatggttcaagaaatcaaacaactggccttttgcagacatataaccataccttagaaaatgtccctattgatattaaatatgacagcaataagtacttcattagtggttattcttatgatacagaggtttatttgacctcaaccaatcgggtgaaattggattcagaaatcaataatgacaccagacattttaaagttgttgctgacttgtcaaatgctaaagaaggtaccaataaggttcctttggagataaaagatcttcctagtggtgtcagcgcagaagcttcaccgacgactataaatgtgaccgttggtaaaaagaaaacaaagacgtttaaagttgttggtaaagtatctgataatcaaattgctgatggttacaaattaaagaaaatttctactagtgcttcagaggtagaggttactagcgatgagtccactattgaacagattgatcatgtagtagctgttcttccggagaatcaagtcctatccaaagattacagcggttcagtaaccttgcaggctgtttctgaaaacggtaaaattttaccaagtattattgacccaacaaaaacagacttagaggttgaggttgaagaattgtcaaaaaaagtaccgattattgttgagttaacaggtcaaattaacagcagtctgtctgatattcgctacgaattagctacaaaagaggttcttgtctatggtaaacaagaaaatctcgaaaaaatctcttacattaaggctaaagttaatatttcagatgttactaaggatacaacaaagacaattcccttagctgcggataatcttaagataagtcctgcaaaagtaactgttaagttgacagctaagaaaaaataatattataatgattaaaattaatggaggaagatgcttagcatcaaatagttatgggaaaatattttggtacagacggcgtacgtggtgaggcaaatgtagaactaacaccggaactggcttttaaacttggacgttttggcggctatgttctgagtcagcatgaaccggagcgcccgcgtgttttcgttgcccgtgatactcgcatttctggagaattgttagaatcagctcttgttgctggattgctttctgttggtattgaagtctataaactaggtgttctggcaacaccgggggtttcttatttagtgcgtactgaacaagccagtgcaggtgtcatgatatctgctagtcacaatcctgcgcttgataatggtatcaaattctttggtggtgatggctttaaattagctgatgaacaagaagcagaaattgaagctttattagatgctaaagaagatgacttaccccgtccttcagctcaaggattgggaatggtcgttgattatccagaaggacttcgtaaatacgaaaagttcttagtgtcaacaggttcagaccttgaaggaatgaaaattgctattgatgcagcaaatggtgctgcatcttactcagcccgccaagttttccttgatttgaacgctgatatcactgttattggcgaggagccggatggtctcaatattaatgatggagtaggatctactcatcctgagcaacttcaaaatcttgttaagggatctgattttgttattggccttgcttttgatggcgatagtgatcgtttgatcgctgttgatgagaatggtgaaattgttgatggtgataagattatgtatattattggcaagtatctttctgaaaaaggaaggctgtctaaaaatacgatcgtcacaaccgttatgtcaaatctcggcttccataaagctttggatcgtgagaatattaacaaaaaaatcacagcagtaggtgatcgttatgttgttgaggaaatgcgacgttcgggctataatctcggcggtgagcaatctggtcatgtgattattatggactataacacaacaggtgatggtcagctgacagctattcaattgaccaaagtgatgaaagaaacaggtaaaactttgtctgaattggccaatgaagtgacgatttatccacagaaattagttaatatttatgttaaaaatgacatgaaaaataaggctatggaagtgccaatgattgcacaaatcattgaaaaaatggaagctgagatggctggcaatggtcgcattctggttcgtccaagtggaacagagcccctcttgcgtgttatggcagaagcacctagtacagaagaggttaattattatgtagataccattgccaaagttgtccaagcagaaattggcatttaaaaatggtgtgtattggactgagatagcttctatgattacttactccttgtaatcaatagaagctatctcagtccttttattttatagttaaaattattcaaaagtaagagataaatgtcagaaaaaataaattatgttatactgaatataacctcaaaaatgtaagcgctttaatatcgaaggaggtgactttatgatcgataaaatgactcagttagttgaagattctttagaagaagcaaaggaattggctattgctcatcgtaattatcagctggacattccccatttatgggctgtcttggtaaaacctgatcaatttgcttttcaattctatcaatctttagaaataaataccaatcagctgattgagattatcaataaagaaatagataaaatcccagtcctttcaagtacagaaaaaagcagttatgcacgtttatacagtcagcgtttaaaaaatttattggatgacgcacatcgggaaatgattgatttaaaggatcaggtgctgactgtagaacacttgatcttggcactttttaaccaacaacgcaatcccattactgtttttttgcttgaacagggtctaaacaaagaaaaactttatcaaaagatgcataggattcgtaaagggaaacctgctatttcttccagtcaagaaactatttatgatgctttagaaaagtatgctgtcaacttaaatcagcgtgctttagatgaacctgttaataaaattattggccgtcagaatgaaatgaatgatattattcgtattttatcgcgtaagaataagaataatgccgttttggttggtcattcaggtgttggaaaaacagccattattgaaggatttgttcagcggttagttaaaaatcaagttccgaaaaatttgcgaggtaagatcatttacagtcttgacataggagccttgctggcaggaactaaataccgcggtgaatttgaagaacgtttcaaagctcttctcaatgatattatagactcaaacggtcagattattcttttcatagatgaaattcattctattgtcagtgcaggacggacagagggttctgttgatgcggccagtattttgaagccgcttttggctagaggaaaaattagaattattggttccactacccatgcagaataccgtgaaagtattgaatacgatagggcgttagaaagacgttttcaaaggatcttagttcatgaaccagatcttgattataccatggaaattcttaaaggtctcaagcccatttatgaaaattttcatggtgtcagacttgaagaagatagtttggaagctgccgcaagcttgtccaagcgttatatttctgatcgctttttgccagataaggctctggatttaattgacgaagcctgtgctgctaagcggcttgcttctcatgcttatcccgtgcaaatgaccaatttgtctcagcaacttatttctgagaaaattcgtttattgcgtttgaccgattctgacactgacgataagtttaaattaaacagtcatcttgagcaattagaggagcaaaaaagccaattattagcaaattggcaaagggaaagagagctcctagatcaggtacaagagcttcgttcacatttaacggctttagaagagcaggctaatcttgctcttgaaaataatcaagtcgcagattatgtccgtctagaagatgaggaaataaagatatgtcatcaaaagatgacagctttagaaaaggaacgtttagacagtcagaagataattaatgttactgtgactagagaagatatagcagctgttgttgaacgcttgacaggcatcaaagtacagggtgttatggaaaacgagcgtgatcgtctcttgcacttagaagaattattgcaccaaaaaattgttggtcaagatcaagccgtacaaaaggtatctcaggccatcattcgctctcgtgctggcattcaaaaccctaaacgtccaattggctccttcctctttttgggaccgactggtgtggggaaaacagcgcttgctaaacgtttggcggaagttctttttggcagtgaacttgagatggtgcgtctcgatatgtctgaatatatggaaaaacatgctgtcgcacgtttagtaggaccaccaccaggttatgtcggatatgaagaaggaggccaattaactgaggctgttcgtcagcgcttatactctatcgtcctacttgatgagattgaaaaagctcatcctgatgtttttaataccttactgcaggttttagatgaagggcgtttgacggattcaaaagggcgaaccattgattttaaaaataccatcttaattatgaccagcaatattggctcaaccaatattttacaaagtctgcaagatagtggctgcattacttcagaagtccgtcataaagttctagatgagctgaatcacagtttcaggccagagtttcttaatcggattgatgagacggtactctttaatgctctttctgaaaaagatatgacaggtgttgttaaggtcatggtttctgatttgcaagctcgcctcttagaacaagatgttcatctgacattgactgaatcggtttataccctcttagctaaagaaggttttgatgcagcttttggtgccagacccatgcagaggacaattatgcaaaagttagaaaaccctttggctttacatcttattcaaaatcagaaaaataaagaaaaagagacttttgtgacagtatctgttaaggataagaaactcaaattcacattctcatagttttctaattttcacaaaatattacttttttaaagaaaaagactaatagttaaacccttgatatacaagcgtttactgttagctttttaattttagaagtgcaataaaatttttaattcacaaacttttttgcttgaaatccctatcaaaaagtactacaatatagaatatagaaagcgttttcaatattatagtacagtttcttttgcaagaaaggagtgtgatattttggctaagtatgatcttttaattattggtgctggacccggtggttatattgcagctgaagaggctgcaagattaggcaaaaaagttgctgtcgtcgaaaaaaaagacattggcggaacttgtttaaacgttggctgtattccttccaaggcttatctgcagcacagtcattggttattatcaatgcaggaagctaacaaatacggcatttcaactaatcttgaaagtgtagactttgctaagttagtcaaccgtaaagatcaggttgtttcgactttacaaggaggtattcacacaacttttaaatctctaaaaattgattattatgaaggccaagcacaatttcttaaagacaagacctttatggtcaatggtgaaaagatttctgggaaagatgttattttagcgactggtagccatccttttattccgcaaattcatggtattaattcggtgaattacctaacaacagatagctttttcaatttaaaagttttaccagagaaattggttatcattggtgggggtgttattgcgattgaattagcctttgccatgcagccattgggtgtgaatgtcactgtcattgaaattgcaccgcaaatactattgacagaggataaagctgcgcgtgctattatcagaaagaaactcaaaacaatgggagctcatatttttgaagctgctaagatagaagaagtaaatgctcaatcagttattttagagggggatggcgctcaagaatttgaccagttgttagttgcaacaggacgtaagcctaatacagaattagctcaggaaatgggattaaagctaacagaacgtggttttgtcaaagttgatgattactatgaaacgtctactccacatgtttatgctatcggtgacttgacggaaagttatatgctagctcatgttgccagcatggaaggcatcaaagctgttagagctatttgtcgtcaggcacaggatcctgttgatgctcaaggtgtaccgcgttcgctctacaccaatccggaagtggcttcctttggactgagtgaagaggaggctaaagaacaaggttatgatgtcctcgttgaacaattaccattttctttcaacggacgggccattgcatcaacagagacgcaaggatttgttaaactgatttcggaaaggaggtatcatcaaattttaggggctgttattgttggcgaacatgggacagatttgttgcaacaattgattttattgagacaggcagaaggaacttttgatcaagttgttgatgcagtctatgcccatccgacaatttcagaactcattcaagaagttgctaagcgaattgttcagtaaagactttaaaataggaggaaggataatgccaaactataaagatttaccacaagaactaacaagaacaaggacaaatgaagctgtttcagaacttgttgatttgaaggttcacacggcaacagatattgaagcccaagaagtttccaaagagcaagctaaagatatgtataaaaccatgtgggatattcgtaattttgaggaaaatgctagacgtttctttgcagcggggcaaattcctggttttgttcatttgtatgcaggtgaagaagccgtagccgcaggagtctgtgccaatttaacggataaagactatattaccagtacccaccgtgggcatggtcattgtgtggccaagggtggtgaccttaagggcatgatggctgaaatttttggcaaggagacgggtcttggcaaaggtaagggtggctccatgcacattgctgatttggacaagggaatccttggtgccaatggtatggttggtggcggttttggtctggcaactggagctgctatgcgtaataagtatcttaagactgatgatgttgctgtttgtttctttggagatggtgccgctaatgaaggccttttccatgaatgtttaaatatggcttctatttggaaattgcctgttatttttgtcaatgaaaataacctgtttgctgaatcaacaccacaatggtattcatcagcatcagctaccattgccgaaagggcattggcctatgatatgcctggtgttcgtgttaatgggaaagatctctttgccgtctatcaagtggctaaagaagctgttgaacgtgctagatctggtcaagggccaactttgattgaagctgttacttaccgtgatcatggtcactttgaaggggatgaacaaaaatataaagctccagacggagaagaaaaagactgggcagatgttgatccactagaagttttccgcaattatactattgaacatgagttattgacagaagaagaattggatgaaatcttagaagaatcaaagaaagatgttgatgatgccattaaatatgctcaagacagtccaattcctaaagcagaatcactacttgaagatgtatttgctgagtaaaggaggttagaaatggctagagaactattatttatgaaagcaattaatgaagcgcttgatatggcaatggccaaagatgacaaaattattttacttggtgaagatattgcaggtggtgttaaggttaaacatttagaagagcaaaacgaagaagcctggggcggtgttatgggggttaccagcggtttaatggctaaatacagtcgtgatcgtgttattgacactcctctttcagaacatggttacatgtcagcttctgttgggatggctttgacgggattgcatcctgtgccagaattgatgttcaatgactttattggtttttgttttgatgctttgattggccaagggtcgaaaatgcgttatatgtttggtggcaaggcaaaagtgcctatgaccgttcgtaccatgcatggtgcaggcgcttcagctgctgcacagcactcaggatcttactatggcatctttggttcaatcccaggaattaaggtagttgttccagcgacaccttatgatgccaagggtctgcttctttctgctcttgaagatgataatattgttatcttttcagaagataagacgttgtatggctttaaaggtgaagtgccagaggattattataccgttccgattggaaaggcagccgtccgtcgtgaaggtaatgatttaaccattgtaactattggtaaaatgctctatgtggcttatgaagtagcagatcgtttggctaaggatggcatttctgttgaagtcattgatcttagaacagttgcaccttgggatcaagaaaccgttctaaattctgtgaaaaagacaggacgcttgattgtgattgatgaatcaaacccacataataatacagcgacagatattgcttctgttgttaatgataaggcattcgattatctagatggcccaattaaatgtgtttgtgcaccaaatgtacctgttccgtttgccatcaatcttgaacaactatacatccctaatgcagaccgtgtcattgaagcagcagctgaattgattgacgacttgaaagcatagaaggggggataatatggctacagaaatcgtgatgcctaaattaggtttaaccatgacagaagggctaattaaccaatggctcgttaaagaaggcgacacagttgcagctggcgatcccgtgttggaaattagttctgaaaagttaacaagtgaagttgaagctccagaagctggtgttattttaaaaatagttaagggagaaggtgagactgttccttgtaaacaaatcattgcttggattggtcaagaaggtgaggctgttcctgacgctgcaggtgacgctccagaagtagatacagaagctgaaagtgaagttgcttcagcagggcaaacagtagttccagaagaaagtaggactgtttcagcagcgcccgttgctgaaaagcatgaagacggacggatttttatcacaccgcttgctcgaaagattgccaaggaaaaagggctagacattacttatatcaaaggaacaggcggtaacggacgtatcacacgccgtgacgttgaagcctttaatcctgctagcattcctacagctgaacctgtaacagctttaagtgctccaacaaatgtaaactatggtgttggtttaacaggtatgcgcaaaatcattgctgagcgcatgatgagtagtatccattctagtgctcaattaacgcttcatcgaaaggcagatgttacgcctttaatggctttcaggcaagatataaaaactaaggttaatgcaccgcttgaaaacggggaaattggcattacaaccttattgaccaaagcggtaacgaaggctttgaaagattatcctgaagcgaatgcttggtatgcaggcggtcaatatgaagaaaaagaagatattcatattggtatggcaactgctttgagtgatggtttggtcgttcctgttattcgtcatgccgataaattaacgctgtcagatttgggacgaactattaaagaagaagcagaacaagcacgtaaaggaactctggatccatccttgtattcaggttccacattctctattaccaatctaggtgctcaaggcattgaatactttacaccgattttgaatgcacctgaagttgctatcttaggtgttggagctatccagaaagctttgactcttgatgagaatggtcaagtagctgaaaaacaatttttaccacttagtttgacctttgaccatcaagtcttagatggtgcaccagcagctgaatttttaggagctgttatctcctacttggaagatgcttatagtctggtattctaataagcagaaataaaagagaaagggaaaattcaattgattttccctttctctttttgagattaaatattacgcgttatttgagctactttatgcaataatttctggcgctcgtcatcagatattttttcgatactggttaattcagttaatttcactggtgagatagcacaaggttttagaatttgctttttcaagactttaccatagtcttggacgaaaggcatagcaaaagatggtgtgttgtgagtcgtgatgatccaagcagattttccttgtaaatgcccttcaagaccgacttttttataagaataagcaaagtcagctacaaagactcggtcaataaagcctttgagtatagctggcataccgctccaccagataggaaagatgaagatcagatgatctgcccaagtaactaagtcgcggtatttctccatttcagcaaccttagccaaatcacgtcgtttatgagtttcattaaattgcaaaacggggtcgaaatgctcagcgtacaaatctaaagtactaacagtgtgttttttggaaagatttgtttgaacttgtttgagaatttcagcattaaaactagttgaatttggatgtgtgtaaacaattaaaattttcatgtttgttctcctttaatgtaaatatcaagcatatgattaatagtcgtgtggatagcttgattatcaaggtcgcgcccaatgggactgttgactagaacagcaagacctgagataaaactccagaagtgaaaaagtgtctcagcttcactattagtgaagctctcttctttacggagatcgaaaacaatatgtttaaatttatcaaaccccggtaagtcagaatccagtacaatagtctcctgagtaattttcatatacttaaagggaaatttaataaagagggcttcaaagaaataaggataacgtttagtaaaagtaatgagattaaatcccatttgagcgagctgatctcgagcagaaactttttgatcaatcccttgagctatttcctgattgagaaaagtcgaaagtcgtgtcaagacaactctcagataatcttccttactcttaaagtggcggtaaggagtcccatgagtgacgccgcagtttttagcaatagttctaagagagagctgatcaaggccattttttttgatttcttcaactcctgtttgaatgagcttttctttcagttgagctgtattgcgcttcattgttttcctccgaaagtagacattgtctaccttgtttataagtatacatcgtctactttattttgtcaaacctctactgcaaaagtgacgtgatgcaataatcggctgatactgcttactgcataataggatttctaagcaactattggagtgaaccattcctttcctttgagacttttttgatagtcatcttaggcagtatagctctctaagcttgattgtggttatctttagaggtcactaattctttatatattaatggcgtaatgattggctggcagttcttgcgtcttaatttttagcttcaaacctttaaaggtccgctagttcactggtctattaaagtatctcttgcttttgtaagtgataactctagcagtttgaggaactgtcggagttacttgatcccatgaacgtcatttcatgctgattgaacaatcttatattaagcgacatcattagcacctctgattggggtatagagttctgaagattttacatatcactgaaaaaagatgtgatataataaaactatgtctaaaaaacctacgtcagcctatgtgcatattcctttttgtacacagatttgctattattgcgatttttcaaaagtttttattaaaaatcagcctgtagatgcttatttggaggccctgattaaggagtttaatgattactatcagattaaggacttgcaaaccctctatattggcggcggtacaccaacagccatttctggggagcaattggattacctgctgactaatctgtcgaaaaatctcaatcttaatatgttggaagaatttaccattgaagcaaatccgggagatttgacaccggataaagtagcagtgttgaagcaatcagctgttaatcgtgtttctttaggtgtacagacttttaataataagcatctgaaacaaattggacgcggacataatgaagctcagatttatgaaagtattgacagtttaaaaagtgctggttttgataatatttctattgacttgatttatgccctgcccaatcaaaccataactgatgtcaaagaaaatgtagctaaagcgctggccttggatattccgcatctgagcctttacagtttgattttggaacatcatacggtttttatgaataaaatgcgacgcgggaaactcaatctgccaacagaagatttggaggcggaaatgtttgactatatcatttctgaaatggaagatcatggttttgagcattatgaaatttctaactttaccaagcctgattttgaaagccgtcacaatctgatgtattggaacaatgctgagtattttggctgcggtgcaggggcttcgggctatgttgatggtatccgctatcgtaaccgcgggcctatccagcattatttgaaagctattaaggaaaagggacaggctcgctttcaagaagaaaggttaagtcaagcggagaaaatggaagaagaactctttttgggtttgcgaaagaaatcggggatttcaattcagcgatttgaagacaaatttggtttgcctttaatggaagtttatggtcaggctattgatgacttagagaaggatggtctgattttagtggaaaaagattgtattaggatgagtaaaaaaggtctctttttgggagatactgttgctgagaaatttattttggagcagaaataatcatggggaaaaaatttaaaacacgttatcaaatacctttttatgaaagtgatgtcaatcataatgttaagctgcctcacattttgtcagttgccttacagattgctagcgatcagtctgttagtttaggtttgggagatgagcgcatttttaaagattataatttagtctgggttgtctcagaacacgaggtgaccattgaccgcttaccacgttttaatgaaattgtggagattgaaacagagccaatttcatacaatcgttatttttgttatcgtgagtttcgcatttacgatcaaaatggtgaaaagcttgtagatattttttcaacctttgttcttatggattatgatacacgcagggtgcatgatgtcccagaagatttggttgctccttatgagtctgagaaaatcagaaaaattttaagggggccaaagtataaagctttggaaaaagcgactgacacgctttatcatgttcgatattttgaccttgatattaatggacatgtcaacaacagccgttatcttgaatggatgtatgatgtccttgattttaattttttaaaagcatatactccgaaaaaaattaacctcaagtatgtcaaagaggtgcaatatggcagtgacattgaatcacgtttggaacaagatggcttaatcaccaagcatgagattacttcaaacgggtacattaatgcacaagccattacgcagtgggaaaaaatataactagatgatggagttaagccatgcaagagaagaaatggttggattggctgattcgtttgcagtcattggcacaagcgggtctggcctatggtaaggataaatatgatattgagcgatttgaagagattcgagatctctctgtgcaaatgctaacggctctttctgatttgccagctcaaaaagttgaaaatctctttgctagtgagaccggctatcaaacaccaaagattgatacccgtgccgctatttttaaagaaaataaaatcctgctcgtccaagaggccaatggcacttgggcgttgccgggagggtggtgtgatgttgatcagtctgtcaaggaaaatactatcaaagaagttaaggaagaagcaggtttaaatgttgtcttagataaagtaatagcagtacaagatagagataaacataaccaaccgccttatgcttataaaatttgtaaaattttttcactctgtcatgcaactggtggcgcttttactaaaaatcttgagaccattgctagtgactattttgaacgagatcaattgccaacattagctcaagctaagaccaatgaagaccaaattcaaatgtgctttgccgcttatgaaaatgatgattggaaaactgtaatagattaaaggagttaggattaatgatatacaagggttaccttattgaccttgatgggaccatctataaaggaaaagatagaattcctgctggagaagattttgttaaacgattgcaggaaagacagcttccctatattttagtgactaataatacaacacgtacgcccaaaatggttcaagaaatgctagcaacctcttttaatatcaaaacgccacttgaaactatttacacagcgaccttagcgactattgattatatgaacgatatgaaacgtgggaaaacagcttatgtcattggtgaaacaggacttaaaaaggctgttgctgaggcggggtatcgtgaagatagtgagaatccggcttatgtagtggttggtttagatacgaatttgacttatgaaaagctaactctggcgactttggccattcaaaaaggagctgtttttattggaacaaatcctgatctcaatattccaacagagcgcggcttattgccgggagcgggggctattttatttcttttggaaaaagcaacacgtgttaagcctattattattggtaagcctgaagctgttatcatgaataaagctttagatcgtctgggcgtcaaacgccatgaagcgataatggttggcgataattatctgacagatattactgctggcattaaaaatgatattgcaacgcttttggtgacgacaggtttcaccaaaccagaagaagtacctgctttgccaattcagcctgattttgttttatccagtcttgcggagtgggatttcgatgaaagataagtttcactttatttttagccttctttttttgctggctttttcagttcttgccaccatttatttagtctggcttttttatcctttagagatatctttgttgggtttggaaaaagtggtttatatgaaaagcggtcagattcaggataatttcaatcgtttaatgctttatttgaccagtccttttcattggcagctggttatgcctgattttccttcttccaaagatggtttgcaccattttgagcaagtaaaatggctttttcatttagcgcaaatctgttttcttttaaccctgcctagttttcttttttttatgaaaaatgtcgttcaaaaaggttatggtgtcttgtatcaacgatctctaaagtttacagcacttatccctcttattttgactctaatcgctgtgggaataggttttgatagttttttcacactttttcatcaagtcctttttgcaggggatgatacttggctttttaacccaaacacagactctgttatctatattttgcctgaagccttctttttacactgctttttgctttttctgattctttatgaggtttcattttgcagccttttgtggcagattagaaggaaaaacaaagagaacagaggcagtacagaagagacaaaacggttctaataactggtttgttttcttttttacgtttttcctttgcagttttagcagtaaaattctaaaataatagttattatcttgttgctaggagttaagaatgttagagttaaagcatattactaaagtatatgaaactgcgggtattaagcgaatggctttggaaaatgttagtgtcaactttcgtgccaatgaatttgttgcggttttagggcagtccggctcagggaaaacgaccttgcttaatattattggcggtttggatcaatacacgactggtgatttattaatcaacggaaaatcgaccaaagattttaaagacaaagactgggacagctatcgcaataatactattggttttgtttttcagtcttataatctcatttcgcatcaaacagcgctggctaatgttgaattagccctaaccctatcaggtgtttcaaaagctgaacgccgaaaacgtgctttggatgctttgaagcgggttggtttggaagatgagattaataaaaagcccaaccaaatgtcaggtggtcagatgcagcgggttgcgattgcgcgtgccttagttaataatcctgatatcttactggctgatgaaccaacaggggctttagactcagaaacatccttgcagattatggatttgctaaaggaaattgctcaagagcgtttagtcattatggtaactcataatcccgatttagcagaaaaatattctaatcgcattatcaaggttcttgatggtcatattattaatgacagcaatccatatactgacgatgagatcagaaaagcaactgttgattttaaaaagactaaaatgtcttttacaacagctctttcgctttcttttaataatttattgaccaagaagggacgaaccttgctaactgcctttgcaggatctattgggatcattgggattgctttgatcttatcactgtcaaatggtgtgcaaaaatatattgctaaaacgcaagaagatacgctggttgcttatcctttatctatcgaaaagtcttccaataaaaattttatcggacttcttgcagctaatagtaatgaaaacaagaagtctgataagaaaaagacaaacaagaagattggaaccaatagtatcctaaagaatatgatttcaacgcaggtcgttgataatgatttggcttcatttaaaacttatatcaaaaaacatcaaaagaaatttgctgctgttaccaaagatattcaatattcttataaaataacacctcgaatttatcagtctgatacttcaaagggagtcaaagctgtcaatcctaatactttaagcaaagatctgaaagataccagcacaagtattcaaacagtcgtttctaaccttgatatttggcaagaattatcttctaatgaaaaaatgctgtcttcacaatatcaagttatttcagggcatttgccaaagcaatataatgaagttgtgcttatggctgatgaaaacaacaaaattgatgattatgttctttacagtttgggaattaaagatgccaagcaattaaatagcaaaacgattaaaaaagtcaaagccagcagttaccattataaagatttgattggcagaacttacaagctcgttatcaattctgatctttaccaaaaagaaggtaatgcttggattgatcgttctgataatgatgcttacatgaagcaagtcatcaatgctgctgaaaatattaagattgttggtattgtcaaaccacaagaaggaacaacaagcgaaagttccagtgccggtgttggttacagccatgatttaactgattatcttgctaaaaaaatcaagagcagcactattgccaaagagcagctggctaataagaaattgaatgtctttaccggtcaatccttttcaagcggtaacaaaactttctcctcagacaatttgagtgttcagcagcaagctagtatggcttcgatgtcagctgaagaattagctgattatgtcaatcgttacaatgaaaatgccaatgcaacttataaagataacttggaaaaaattggtatcattgataacaataatccagaaaccatccatttttatgcctcttctttcaaagataaggaagctctgaaggatttaatcagtgattataataaaaaagtcaaaaaggataagcataagtctagagtaattcgttatacagatacagttggtttgatgatgtcatcagtaacaacaatgattaatgccgtcacctatattttaattggttttgttgctatttccttgattgtatcgtctattatgattggtattattacctatatctctgttttagaacgcaccaaggaaattggtgttttgcgtgctatgggggcttctaagagggatgtaacccgtatttttacagcagagaccattattgaaggtgctatcgctggagtacttggaatcttgattacccttttactaaatattgcgattacacttattgtgaaaaattggctgaatatcaatcatatctcttccctacctatttggtcagcaattgttctcattgctatttctatcttactcaccgtctttgcaggcattctgccatcacgtgtagcagctaaaaaagatcccgtcgaagccttacggacagaataaagacaaaagcgaaacaaaaagataataattgtttcgcttttttatgcaccattatctaataagaccttttaaaagactcaattaaaaatagttaaagtttgttttaaaaggatgataaaaattttaatggcaagcattttccatattttaattttaaatttatgaaacttacgttctttggttgaagaacgtataaaggtattctaatatagccaaaagagcaaagccccagccacacattgctaaaactgatgcagccgttttatttcctaaaagattagcaacaaaattaacaactgaaggagaaagaaaggcacctagattgattcccattaggataactgaagttgtcaatgttccaccctctttggggccaacctgtgctgctcggagaaaagcttgtggaaaaacccaaccaaagaaaattccagcaataataactcccaaaacaaccatagctgcattactggcactggcaacaatgaagaagcccatagctatacctgtcaatgagatgggtagcataaaattaccaacgcgcttacttaattttccaaaggcaatagctgaaaacatagatgacagccctaatactgcaagaatagaagaggctgctgaagcagaaatgaggccagtttcagctccaaaaagtgccatcttaatggtcatcatcataaacatgccaaagataatgagaaaaagcaaggccaagagaaggatatgtccattaatagaatccgccaattttggtctttcttttttaatagttggttgatcgtcaggaataacaacaaaagcgccgaagagaataagcggaataagagcaataaaatatcccataaaggcaactttccaaccagctaataccaaggctcctaataagaaaccaaaaccagcatttccaagattttgaccagtattttgaaatcctaacatatcggataattcttggtctttataaaaacgatacattaaactaactgaaaaaggattaaataaaccaattccacagcccataaggaaacgtaagaagacaatagcataataattaggaataaaagaaggtaaaacaccacctaaaaggtacatcaacaaaccagccataatagtacgtttaataccaaatttattagcaatcgtatctgcaaagagaatgagcagaagcactccgaaatttggaagagttgaaatcatctcaatttctgctgttgactgttgagtaaaagtcttttgcaacagattattggcaatagaaatcgaaggagctgtcatggctagaatggatagagacaagactgaaattttaaaaaaccaagagcttggactgagatttttttgattcatgagagcctcctaattgtattttttaatatcgttagcggcagctagaccagctaaacgtccagatgtccatgagaagcctgaagctaaaccttcataagcaggataattgcgaggggcataataaccaccagcattagctccgccagtataaagtccaggaattgctttcatataagcatcaagaacgcgaagatctttatcaacacggacaccgccaactgttcctaaataaaccacttgagcgataaaagcataaaatggtcccttcttgacatcatatttaagtgatgctgcagatttactgaatatttcatcgttttggcttgcaatggccttgttgtattctgccacggttgccttaaaagcgataggatccattccggaattctgagctagctcttcaagactgtctcctttaaaagcgatgccttgttggactgcttgctcagctaagcttacaaaatctcccttagcctgagaagcacccggtccggatttggaaatagtaagcagtggttgcttcgtataactttcaagtgttgctgtgtccatgacatagtaatatttactacctacaccataggcagcgttggaccattgaaccgtatcataaacgacatcttcattggtaaaacgagaaccatttggatctacccaaagcaagggtgaaagcaaaagttgtgttagaggtgaatcattaaagcctgctaattgcttgcctttggtttcttgggtaacagtggattgagccatttgcgctgcatgaataagagctgatccatcaatattaactcctccagcagcttccatagctgacaagccttctcccatattaggaacacctaaagtgcgaagatttaaagttcgcataaccttggctacacgtcttttatcaccgccaaagccacctgtagtaataatgctagctttagcatgcactgtcatactttctcctgcatcattgatagctttcaaaccacggacatgtccattagaatcttgaaggagttccgtcattctgacaccaaagataaaggtgactcccattgcttccaacgatttttgaatttgcagataactagagtccttattcatatacatgtgataagaaccaccttggtaatcattaccaaaatgtgcaaattgagtagaattcttagttggattgagcttaatttccattcccaatttttcaatttcctctaaagtttctttagcatgttcgatgatgttttttaacaaagcaccattacttagaaaatgattatgttcttgcagttgtctgatggcttcttgcgtagaaagctttaaacctgcagcgttttgctctttagtgttaatggcaaaaaaacctgaggaaattctagtattcccaccaatttgttttaatttttcgagaaccaagactttaagtccattttgagcggcagcatgagcagcagctaaaccagcaccgccagctccagcaacgacgacatcaactttgtattctttttccatatgacagttcctcgcatttttaatttatgttataattataagtgaaaaacatcacatttgaaaagccttacaaatatcttataaaatgactttttatgacttttagatgggaggtttgcttagtatggtccgttttatttcaaataccttatcgcaaactctaaatgaaccctttcagcaatctcataaatcttgcaaacatctttatattttggaaattctttcgcaggtggttattgtttcagaccaaaaacaagtccctttacaaccttatgatattatcctcgctcaatcttttaatcacttgcagatagactctctagatagaaatcccattttactgcgtttatatagtcttgattttgacctaccgtcaccgctcaatcaatacactgtgggcgacaatcctctcattcatgatttaatgaatgatcatacaagtgaagatgcttatattctttttacaaatctatccgatttaatttgccatgcctatcttgatgcccttgaaaaattagaaaatctaagagacaataatgatgaacaagtctatattgattttcaaaggcaaaagctagcaggtttgttatttacggagctcctgcgtcaacatgatgctaaagtatctaaatttgcctctcgctttccttcagtaaatgttaagtatgcttctaaggatagccaatcaggtgctattatgaaatacgtttcagataatgttcatcatattagcttaaaagaagcggcagctcatttttcttatcaagccaattatttttcaaggctctgccacgagctttttggtatttcttttaatgaattaaaaacaaccattcgtttagaaattgctaaagaacaattgcgactgacaactaaaagtgtagaagaaattagccaagaattaggctacaaagctgtttcaaattttcatcgtaattttaaaagtcagacgggcatgacaccaaatgattatcgacaagataaacaatggaaagatacttaaataaaagttaaaaaaagtcattatataagatatgactttttttaatcgcaagatgcatttttctgtataatagagatagaataatcagaaaaagaaaggaactatcgatgaaattagttgctattgttggttccaatgcctccttttcctataatcgtttattgttgcaatttattaaagagcggttcggtcaagcttttgcattggagattttggaaattaaagagctccctcttttcaatcaagatagtagtgctgcagattgtccccttattcaaaagcttaatgaagatatcttaaatgcagatggcatcattattgcgacagcagagcataatcaaaccattacagccagtttaaaatccatgcttgaatggttatcttaccagcttcatccctttaaaaataaacctgtcatgattgtcggagcttcttattataatcagggaacttctcatgcacaagagcacttaaggcaaatcctaaatgctcccggtcttgatgcttgggtcatgcccggacatgaattttttctagggaatgcctcagaagtctttgatgaaaataatcaaataaaagatgatgataccgttatttatcttgcgcaatgtttacaacgttttattcgctatgtcactgttgttcaggagttaaagggagattccattcaacttagtgatgcaatttcaggagcatcagaatcagtccaagaggactctgctgcatctgctatgctagaaaagcaattgtcactacaaaagaaagagaccaatactccctttgaaagagcactagataaaacctatggaccggctttgaaagatacacttgaagatccatttgataaggatttagatgcccaatacaaagcaatcaaaaaacaaccaataccttttgaaaaagctttagacaatatctttggaaaagatttaggtatcgaaacaaccgatccgctggatgcactattgaagtagaaacactaaattaataagaaagagccaaacctcgaaagtttggctctttcttattgactaaatcatggttaatgtaaacttacatttgggttaattttttattaatgctcaaatatcactgaatatttaggccttttcaatatggaatcaaacttgagaagcaactgtcagtcaattttatagtagaaataaggatgaacacattaatttgctttctgaaatgaaaaaatacagaaatatttctgtattttttcatttatattgttaaaatatttcgcagatagtggtataatagaaacgcttacagtaaagcaaataaaaaagcaccgaatcggtgcgcactttttcaagttgaatacggataaaccttattttaacttgctgtgttgtttcgaatgattccaacacaattattgtataatacttattgcttttttgcaaggacattttttcaaaggagacatttatgaaaaaaccttactctattggacttgatattggaaccaattctgttggttgggctgttgtgacagatgactacaaagttcctgctaagaagatgaaggttctgggaaatacagataaaagtcatatcaagaaaaatttgcttggcgctttattatttgatagcgggaatactgcagaagacagacggttaaagagaactgctcgccgtcgttacacacgtcgcagaaatcgtattttatatttgcaagagattttttcagaagaaatgggcaaggtagatgatagtttctttcatcgtttagatgagtcatttttgacagatgatgataaaaattttgattcacacccaatcttcggcaataaagcagaagaagatgcctatcatcagaaatttcctacaatttaccatttaagaaaacatcttgcagattcaactgaaaaagctgatttacgcttggtttatctagctttggcacatatgattaaattccgtggacatttcttaattgagggtgaattgaacgccgaaaatacagatgttcaaaaattattcgctgatttcgtaggagtgtatgatagaacatttgacgatagtcatttatcagaaattacggttgatgcttcgagtattttgacagaaaaaattagcaaatcacgccgtttagaaaaacttataaataactatccaaaggaaaagaagaatactttatttggaaatctcattgctttgtctttaggattacagcctaattttaaaacgaattttaaattatctgaagatgctaagttgcaattttctaaagatacttatgaagaagagttagaagtactattagctcaaattggagataattacgcagagctctttttatcagcaaagaaactgtatgatagtatccttttatcagggattttaacagttactgatgttagtaccaaagcgcctttatctgcttcgatgattcagcgatataatgaacatcagatggatttagctcagcttaaacaattcattcgtcagaaattatcagataaatataacgaagttttttctgatgtttcaaaagacggctatgcgggttatattgatgggaaaacaaatcaagaagctttttataaataccttaaaggtctattaaataagattgagggaagtggctatttccttgataaaattgagcgtgaagattttctaagaaagcaacgtacctttgacaatggctctattccacatcagattcatcttcaagaaatgcgtgctatcattcgtagacaggctgaattttatccgtttttagcagacaatcaagataggattgagaaaatattgactttccgtattccctactatgttggtccattagcgcgcggaaaaagtgattttgcttggttaagtcggaaatcggctgataaaattacaccatggaattttgatgaaatcgttgataaagaatcctctgtagaagcttttatcaatcgtatgacaaattatgatttgtacttaccaaatcaaaaagttcttcctaaacatagtttattatacgaaaaatttactgtttacaatgaattaacaaaggttaaatataaaacagagcaaggaaaaacagcattttttgatgccaatatgaagcaagaaatctttgatggcgtatttaaggtttatcgaaaagtaactaaagataaattaatggatttccttgaaaaagaatttgatgaatttcgtattgttgatttaacaggtctggataaagaaaataaagcatttaacgcttcttatggaacttatcatgatttgcgtaaaattttagataaagattttctcgataattcaaagaatgaaaagattttagaagatattgtgttgaccttaacgttatttgaagatagagaaatgattagaaaacgtctaaaaaattacagtgatttattgaccaaagaacaactgaaaaagctggaaagacgtcattatactggttggggaagattatcagctgagttaattcatggtattcgcaacaaagaaagcagaaaaacaattcttgattatctcattgatgatggcaatagcaatcgtaactttatgcaactgattaacgatgatgctctttctttcaaagaagagattgctaaggcacaagttattggagaaacagacaatctaaatcaagttgttagtgatattgctggcagccctgctattaaaaaaggaattttacaaagcttgaagattgttgatgagcttgtcaaaattatgggacatcaacctgaaaatatcgtcgtggagatggcgcgtgaaaaccagtttaccaatcagggacggcgaaattcacagcaacgtttgaaaggtttgacagattctattaaagaatttggaagtcaaattcttaaagaacatccggttgagaattcacagttacaaaatgatagattgtttctatattatttacaaaacggcagagatatgtatactggagaagaattggatattgattatctaagccagtatgatatagaccatattatcccgcaagcttttataaaggataattctattgataatagagtattgactagctcaaaggaaaatcgtggaaaatcggatgatgtaccaagtaaagatgttgttcgtaaaatgaaatcctattggagtaagctactttcggcaaagcttattacacaacgtaaatttgataatttgacaaaaggtgaacgaggtggattgaccgacgatgataaagctggattcatcaagcgtcaattagtagaaacacgacaaattaccaaacatgtagcacgtattctggacgaacgatttaatacagaaacagatgaaaacaacaagaaaattcgtcaagtaaaaattgtgaccttgaaatcaaatcttgtttccaatttccgtaaagagtttgaactctacaaagtgcgtgaaattaatgactatcatcatgcacatgatgcctatctcaatgctgtaattggaaaggctttactaggtgtttacccacaattggaacctgaatttgtttatggggattatcctcattttcatggacataaagaaaataaagcaactgctaagaaatttttctattcaaatattatgaacttctttaaaaaagatgatgtccgtactgacaaaaatggtgaaattatctggaaaaaagatgagtatatttctaatattaaaaaagtgctttcttatccacaagttaatattgttaagaaagtagaggagcaaacgggaggattttctaaagaatctatcttgccgaaaggtgattctgacaagcttattcctcgaaaaacgaagaaattttattgggataccaagaaatatggaggatttgatagcccgattgttgcttattctattttagttattgctgatattgaaaaaggtaaatctaaaaaattgaaaacagtcaaagccttagttggtgtcactattatggaaaagatgacttttgaaagggatccggttgcttttcttgagcgaaaaggctatcgaaatgttcaagaagaaaatattataaagttaccaaaatatagtttatttaaactagaaaacggacgaaaaaggctattggcaagtgctagggaacttcaaaagggaaatgaaatcgttttgccaaatcatttaggaaccttgctttatcacgctaaaaatattcataaagttgatgaaccaaagcatttggactatgttgataaacataaagatgaatttaaggagttgctagatgttgtgtcaaacttttctaaaaaatatactttagcagaaggaaatttagaaaaaatcaaagaattatatgcacaaaataatggtgaagatcttaaagaattagcaagttcatttatcaacttattaacatttactgctataggagcaccggctacttttaaattctttgataaaaatattgatcgaaaacgatatacttcaactactgaaattctcaacgctaccctcatccaccaatccatcaccggtctttacgaaacgcggattgatctcagtaagttaggaggagactaatgggctggcggacagtggttgttaatacgcattccaagttgtcttataagaacaaccacttgatttttaaagatacttatcagacagagatgattcatctgtctgagattgacatcttattacttgagacaacagatattgttttgtcaactatgctagtcaagcgtttggttgatgagaatattttgctcattttttgtgatgataaacgtttgccaacagctatgctcatgccttactatgcgcgacatgattccagtttgcagctaaacaatcagatttcttgggcagaagaggtaaagtgtgatgtttggacaacaatcatcgctcaaaagattttgaatcagtcatgttatttgggagaatgttcttattttgaaaaatctcagtcaattatggatttatatcatgacttagagccttttgaccctagtaatcgagaaggacattctgcgcggatttatttcaataccttatttggaaatgatttttccagagaacaagataatgatattaatgcaggtcttgactatggttatacgctgctgttaagtatgtttgcgcgtgaagtggttgtatctggctgtatgacacaatttggtctcaagcatgccaaccaattcaatcagtttaactttgccagtgatattatggagccttttcgtccaattgttgaccgtattgtttatgaaaatcgaaataactcttttattaaaataaaacgtgagctattcagcatgttttcagacacctatctttacaataataaggagatgtatttgacaaatattgtcagcgattataccaaaaaggtgattaaggcgctgaataatgatgggaaaggagttcctgagtttagggtatgagttaccgatatatgcgaatgattttaatgtttgatatgccaacagatactgctgaggaacgcaaagcttatcgtaaatttcggaaatttttactgagcgaaggtttcatcatgcatcagttttcagtatacagcaagctgcttttgaataactctgccaatacagccatgattgcccgcttgaaggagaataatccaaagaagggcaatatcaccttgttgaccgtgactgaaaagcagtttgcccgtatgatttacctgaatggtgagcgtgatactagcattgctaattcggattcacgactggtctttctaggggaggcttttcctgatgaaacttaattttcctatattggatgaaccaataactcttgaaaaatctacgattttggtattagaagatgtgcaagtttttgctcaaatggtgagaaatctttatcaatatgatgaagatagtgaacttaaattttttaatagaaaatttaagagtctgaaaccatctgagttaatgcttgtgacagatattttaggttatgatgtcaatgccccgtccttgctgaagttggttcacgctgatttagaaaatcagtttaatgaaaaaccagaggttaagtctatggttgaaaaactggcaaataccattacggaattaattgcttatgaatgtttagaaaatgaattggacttagaatatgatgagattactatcttagagttaatcaaagctttaggcgtcaaaattgaaacacaaagtgataccatttttgaaaaaatgtttgaagtccttcaagtttataagtatctaaataaaaagaagcttctcgtttttatcaatactttatcctattttaaaagagaagaaatcacgcaaattctagaatatattcacttatccgatatggttgttttatttattgaaccccgtaaaattgatggttttgctcaatatattttagatgaagattatttcttgataacagaaagcaacaactaaatacgaataataagatagtttctaaatcaggggctgtcttttattatggattgacaaatgcgtataatgcgtataaaataaaaggagaaatgttatttgccattaacagggaaagaattagctagattagcgataaacaatggatgggaagaagttcgggtgagaggaagtcatcatcatttcaagaaagatggagtaccttatattgtgacgattcccattcatggaaataaagtgcttaaaattggtcttgaaaagaaactcttaagggatttaaatttattatgatagaggaggaagtcgtcatgttaaaaacatatcctgcaatttttcataaggaagaggaaggatattgggttgaatttcctgaatttggcggtggtacgcaaggggaagatttggaagaagccatgaagaacgctcgtcagatgttagaaagtgtgttggcatcttatcttgatgaagggttggttctacccatttcaagcgatattcagaaaatatctgttgaagatggttttgcgaccatgattcaagctgatcctagtccttatctcaaaaataacaaagctattcggaaaaatgttaccgtgcctgagtggttgatacgattagcagaccgtgaccgagtaaattattctgaagtattaacaaaggctttggaaaagaaactacaattataaaacaataaaatcgctagaaagattgatttctagcgattttttaggtataatataagcaatcaaaaccttttaaaaaagaatcattttgaagctgaaatctggctgagatgaatggcgcgattacgaaatgtcgagacaaaaattggtccacgaggttttagagctgtgttgtttcgaatggttccaaaacattggcagaatgtcgtttgtgttgtatgttgttttagagctgtgttgtttcgaatggttccaaaacatcctttttggttttgtaatcaattctaaagttttagagctgtgttgtttcgaatggttccaaaactcgcttcagcgctggtctacagtttcggaagttttagagctgtgttgtttcgaatggttccaaaacgtgctcgaccgctagcatttttcgcctgctgttttagagctgtgttgtttcgaatggttccaaaaccattggattttaccattttgcacgctttgggttttagagctgtgttgtttcgaatggttccaaaacagagcgtgtgtattttctttcggaatgattgttttagagctgtgttgtttcgaatggttccaaaaccttgcgcgctattttgttgcatctcatcaggttttagagctgtgttgtttcgaatggttccaaaacttttctgttttataatataaaaaaagcagagttttagagctgtgttgtttcgaatggttccaaaactatcaaagataacgctagagattactatcagttttagagctgtgttgtttcgaatggttccaaaacaaacgagaagcaacaaaggaaacacactcagttttagagctgtgttgtttcgaatggttccaaaaccaaatggaagtacagcgcttgacttgataagttttagagctgtgttgtttcgaatggttccaaaacaacactttatcaattttgccagttgacaaagttttagagctgtgttgtttcgaatggttccaaaaccgcgtttctctgagagaatttggaaatgacagttttagagctgtgttgtttcgaatggttccaaaacagtgttgagattgacttttatagttatcgagttttagagctgtgttgtttcgaatggttccaaaactatagctaatatgtgtatactgacagcgcagttttagagctgtgttgtttcgaatggttccaaaactaaaaagactacacaagaattaattgatatgttttagagctgtgttgtttcgaatggttccaaaacgtcacgagctactctgtctaaatagtttgggttttagagctgtgttgtttcgaatggttccaaaacatgtgaaaagaaagtaactactacatttgagttttagagccatgttagttactgatttactaaaatgcattatgcgaaagatttttaaataagcaaaagacacttgaagcaataattcaagtgtcttttatgggactttctttaatttttaggtaatgaccgttccgatgacttcaattgtatcatcttcttttaaaatgatgtcatcataatctggatttaatgagatgagtcgaatttctttgttttttcggtagagttttttgacatatgcctcattatttacaataacaacgataatttgtccgtgatggatagctttagtctttttaacaaaaataacgtcaccgttgtaaaataaaggttccatactattaccattgacaataagagcaatatcatgttctggaattggtattgggtatttaatggtttcttgtttttcatgtccaacccagataccagtaccagctgaaacttcaccataaatctgaatgttttcgtattgacgtccaaaggtttgatacaaatccttagcttttatcacattatcccaatgaataattgtctgatcgtttaattctttggcaataaaagaatcaacaaccttttgatactgcgtatgatttgatttgtcagcaactttatcctcagtcgtttcatcactggcagacaagcttgctgtttcatcttgttcttttgattgttggtaacagaaatctaagacttttatctgtctcttcatttctaattgtttggcaatatgattaattttatcaagagtagaagagtcctttttacttgcaaatctagggtcaatatcggatttttggagaccaaagtaatctgcgattttttgaatattccctatttttggcaaactctttcctttaacatattcattaagactacttgtaggaatgttaaggatagtggctaagtgagattgtttcattccgctctcagctagaagtctttgaagattggcagaaatagccttcattgcttctaaatcttgtggagttaatttaccgcgtcccatgcttcaccttccttaaagtaaaatcatttaattacataatatcgctttcatctataaatgtaaatagaaaaatagtttttaagaaaaaaatacttgacttccgttttaaaacgaattataatattcttattaaaaatagctttcataaaggtaaaattttaactacaatataatcttcaccttattaatttcaaaatcttaaaatctgtggtggttaagatgattgattaggttccctttttcttaattaatctgccttttgaaattaaaagtatttcatatgaataatactgctatttttaggtaatgattcctatgcagtttgtatgggaatcaaatggtaagttgaaaggggatgcagaagtggagaagttgacattgcgagctctcagagtgaattatagtttaagtcccaaagaggtggctgattgtctaggaatccctcaacacactctgctaagctatgaagaagatagttctgaaattcccattcaactggccaatgatttggccaattactatgatatcagtttagactctattttttttggtaaaaattccgatttaaaacagaaatttaaaaataagaataatagataagagaaaacactttgattttaattgagtctattttaaatgaaaatttgtaataaaaaagacattattttttaatttatgagtcttattctttgaaaaaatgtctttttattgttataattaaaattgtattcttatgaattaataatataagggatggtttttatgaaatcgaaaactgctaaaattactttgctaagcagccttgctttggcggcttttggagcaacgaatgtttttgcagatgaagcatcaactcaattaaattctgatactgttgcagcacctactgctgatacacaagcatcagaaccggctgcaacagaaaaagaacagtctcctgttgtaactgttgtcgaaagtcacacacaaggaaatacaacaacgacaacatctcaagttacttctaaagaattggaagatgctaaggctaatgctaatcaggaaggtttagaagtcactgaaactgaaactcaaaaacagccttcggtagaagctgcagatgcagataacaaagcacaggcacaaacaattaatacagcggtagctgattatcaaaaggcaaaagctgaatttcctcaaaaacaagaacaatataataaagattttgaaaagtatcagtctgatgtcaaggagtatgaagctcaaaaggcagcttacgagcaatataaaaaagaagttgcacagggtttggcatctgggcgtgttgaaaaagcccaaggacttgtgtttattaatgaacctgaggcaaaactttctattgagggtgttaatcagtacctaacaaaagaagcacgtcaaaaacatgcaactgaagatattcttcagcaatataatactgataattatacagctgctgattttacccaagcaaatccatatgatccaaaagaagatacttggttcaaaatgaaagtgggagatcagatttcagttacctatgataatatcgttaattcaaaatataatgataaaaagattagtaaggtaaagattaattatactctcaatagttcaacgaataatgaaggcagtgcactggtcaatttgttccatgatccaactaagacaattttcattggtgcacagacatctaatactggcagaaatgataaaatcagtgtgacgatgcaaattattttttatgatgaaaatggcaatgaaatcgatttaagcggcaataatgccattatgagtctctcatcgttaaatcattggacgactaagtatggcgatcatgtggaaaaagtaaaccttggggataatgaattcgttaaaataccgggctcatctgttgacttacatggcaatgaaatctattcggctaaggacaaccaatataaagctaatggtgcaacctttaatggtgatggagcagatggctgggatgctgtcaatgctgatggaacgccacgtgctgcgacggcttattatggtgcaggtgctatgacttacaagggagaacccttcacctttactgttggtggtaatgatcaaaacttaccaacaaccatttggtttgcgactaattcagctgtagctgtgcctaaagatccgggagctaaaccaacaccgccagaaaaaccagagttgaaaaaacctactgtgacttggcataaaaatcttgttgttgaaactaaaactgaggaagttcctccagtgacaccaccaacaactcctgatgaaccaacgccagaaaagccaaaaacaccagaggatcctcaatcacctgtcgtagctaagtcagtaagctttagaacggcaagaaaaggagaaatgcgtgttagagagcgtgattatcaaccgactcttccacatactggggctgctaaacaaaatggtttagctactcttggtgctatttcaactgcatttgctgcggctactttgattgcagctagaaaaaaagaaaactagagtgttaatttctataaaaagaggttgggacaaaaaagtgttccgccctttttattgtatagtagttgattagattagactcaagcctttaacagtctactgaactgttgaaggcttgagcagcagttcttgttaatacctagtcaattttgcggaggtgggacagcagaattgaaatcacaatttcattacgatctaccgatttttattccgctctttgtggtttttgtgatgggtaagttcactataagtattatggaacttttgagttcaccaaaaagatcctatgattttatagtgaggttaaatgggctatcgttgtttgatatgcaaaatataggaattttcaataataattgaaaaatattagtaggtgaagctagaggaaagtattatgacagatcaagaattagaacatttgatagtgactgaacttgaaagtaaaagattagatttcacttattctaaagatataacagaattttttgatgaagcatttcctgaatatgatcagaactactaatgatttataaaatgatttataagatatgctcattgctttttcaatcttgtagggttaaggttataagtcaaagcgtgagaattccaattaattactgcgtcaaactgctaagtctaatagatttaaaagagactggatttttgtcttagaacaactgttagataatataaagacaggataaggttatggtaagcccctgtcttttttgttataataaagctactgattaattttgacaaggataaaaaatgactatagaacaacttaaaaatcgtcaggagaaaattcgtaatttctctattattgcccatatagaccatgggaagtcaacgctggcagatcgtattttggaacagacagaaactgtttctagcagagaaatgcaagctcagcttttggacagcatggacttagaacgtgagcgtggtattaccattaaattaaatgcgattgagcttaattataaggctaaaaatggtgaaacttatatttttcacttgattgacacgccaggacatgttgactttacttatgaagtgtcacgttctttggcagcctgtgaaggtgccattttggtggtagatgctgcacaaggtattgaagcgcagaccttagccaatgtttatttggctttagataatgatctggaaattttacctgttatcaataaaattgacttgccagcagctgatcctgaacgtgtgcgcactgagattgaagatgtcattggactggatgctagtgaagctgttttggcttccgccaaagcaggcatcgggattgaagagattttggagcaaattgtggaaaaagtaccagctccaaagggggatgttgaagccccactcaaagctcttatttttgattctgtctatgatgcttatcgcggcgttattctgcaaattcgggtcatggatggtatggtcaaacccggagataaaattgaactcatgagcaatggcaagacttttgacgtgacagaagtaggaattttcactcctaaggctgttaatcgtgactttttggcaacgggtgatgtaggttatttagctgcttcaatcaagacagtggcagacactcgtgttggtgatacagtgactctggcggactgccctgccgaagcacctttgcatggttataagcagttgaatcccatggtttttgcaggaatttatcctattgattccagcaaatataatgacatgcgtgaagccctagagaaattacagcttaatgatgccagtcttcactttgaacctgagacttctcaagcccttggctttggttttcgttgtggcttcttaggtcttttgcatatggatgtcattcaagagcgattggagcgtgagtttaatattgatctcattatgacagcgccatctgtagtttaccacgtttataccacagatggggagaggcttgaggtttctaatccatctgaatttcctgatccaactaaggttgatagtattgaggaaccttacgttaaagcccagattatggtgccgcaagagtatgtgggagctgtcatggaattatcacaacgtaagcgcggcgactttgtgactatggattacattgataataaccgagtcaatgttatttaccagatccctttggctgaaattgtttttgatttttttgataaactaaaatcctctacccgtggttatgctagttttgattatgatatttctgagtatcgcaagtctaagctggtaaaaatggatattctgctcaatggtgataaagttgatgcgcttagcttcattgtccataaagagtttgcctatgaaagaggaaaattaattgttgaaaagttgaagaagatcattccgcggcaacaattcgaagttcccattcaagcagcgatcggtcaaaaaattgtggcgcgttccgatattaaggccttgcggaaaaatgttcttgctaaatgttatggcggagatgtttccagaaagcgtaaacttttggaaaaacaaaaggctggtaaaaagcggatgaaatcaattggttcagttgaggtccctcaggaagcctttctcagcgttctgtccatggatgatgacgataagaaaaaatagtttttaatagtggcagcaggagattgcaatggcagcacttaataaagaaatggttaatactttgcttggtccgatttatacttgtcatagagagggtaatccctgttttgtcttcttaagcggtgctggttttttcagtacggctgacaattttgctaatattattgacaaattgcctgatagcattggcatattaaccatagatgcccccaatagtggctacagtcctgttagcaatcaagcgaatgttggactcagagattgggtcaatgctattttaatgatttttgaacactttaaatttcaatcgtatcttttatgtgttcatagcattggcggttttgcagctttgcaaataatgaatcaatcatcaaaggcttgtttaggctttattgggctggaaccaacgactgctatgatttatcgtgcgggtttttcttcggatctttatcctcaattggctctgcggcggcaaaaattaaaaacagcagctgataggcttaactaccttaaagatctcagtcgttctcatttttcttctcaacagtttaagcagttgtggcggggctatgattattgtcagagacaattaaatgatgttcagtctttgcctgattttaaaataaggcttgctttaggagaagaggattttaaaactggtatttctgaaaaaattccttctattgttttttcggagtcttttcgtgagaaagaatatttagaatctgaatacctaaataagcatacacagacaaaacttattctctgtggtcagcatcattatttgcactggtcagaaacaaattccattttagaaaaagttgaacaactgctgtcaaatcatgaaaagttgtaaaaaatagaagaggtagaagctagacagctgctttttgatactaagtttcaaaagatataaaagaaaaaggagacttctatgtctattagattggcacaagttacagatattcctgttctgaaagagcttttaaatcagatttttcaggttcatcaaacggttcgcccagatctctttaagaatacagacaagggaagtaaatattctgaaacagaattgaaggaacttttacaagatgagtcaaaacctatttttgtctatacggatggtaaaaatagagtcctagggcatttatttttggttataaaggagactaagggatcttcggtatcaaaacccttgaaaactctttttattgatgatttatgtgtatcaaaagaagccagaggacaaaagattggtcaggagctttttgaatttgccttaaagtatgcgaaaaaattaggctgctatgatcttactcttaatgtctggaacgacaataaaggagccttggctttttatgaacgtcaaggattaaaagccagagaaacgaaaatggagaaaattctttaaaaaacctttaaagcactatttttttcatgaaaaattgtgtaaaataagaagagtagaataagaaaatggagggattctcatgccaagacgtcgtgctagccgtaggaaatcaaaaaagaaggctgtttttagtattttattaacgggtattactcttattattattggtttagccgtttattttatttcagcctattttacaaatacaaagaaaacagcaaataaagaaaagacacagacacatattgttaatcctaagaaggatccagaagaaaagaaggaagcagattccgcttcaaaagcaacatctaagtttgatttaacaactattgctacaggagattacagttcagctgcgggaacttggcaaaatgaactgggcgatcagcttaagtttaatgcaagtggtcttgaaagtgccactatccaaaatgcaacggatttcaccatttcatctggacaggcaacaaatgatggcctgtatcaagcaactttgacttcagcagatagtacagtggtttataatttgctctttgttaaaggcgggacagcaatacctgaaaattactttacgacaggttatagtgatacctcagatacttctcgtgatcgtctttatatcagctcgcaaacgacttttggcagcgatgatttcagcaagggaattttctataaatctgaaaattaagcaatataaaaaagtgaggaaatgaaatctcacttttttgtgtttttaggtttaattgaaaaaatcaggacatgttcaaagaggaattgtcagtcacttgcctcttttgaccaatcatttgcttgattcccaatagaatatagccaaagagtaagtacagtagtgcaataaccaaggcattgattaacacttgctgtgctccgtatttattcatattaatgaaaaaatatgggaagggactatcagcagtaccagggattggccattttaagagaagtccattgataagcgcaaaaccaaagtaaagtaagggaagacaggtccagataatagggtcaaaccaacgatatattttgcgacgatcacaaatcaaggtatcaaaaatagtactaagaggaacaatgtaatgaacaaggaaattgcgaatagtatagtaatcgtaagatcttaccttaggtgctaataaaaaatgatagaccataaaagtaatcataattgtcatggttacaccacccttgaggcgtaagagcttaggattggaattgatagaaccgttacgcttttctttaatgacaagataggtcagaaaactacagacaatgacatttgaaagagttgtataataaaggagcattccccaaccggattgtttgatttgaatgctgacgccgataagacctaaaagggcaatcagacttctgaaagcttgtgttttggacatgataaacctttctaagggacaaaacctttattatcataccatattttcattgacctgtaagtaaaaactttgtaaaatgaagaccttaaagcaattgtagaaatgagacgatgtgacagaattttctaaaaaatttaaaataagcagctagaacataatgtgcatttcactctcttaaactcctagaacctgctcactagctataattaacatgaatgggaacgtgttttttgagtttttcttttatcttaaaataacagcgtttacataaaaatgatataataatgaagaataatactttatttgggaggaattaatatggttacacgccaacatttttcagaagattcaatgcgtaaaaacaattcttatttttcagcattaaaagctactattgaaactgctttttacgaaaatcatgtggtgcctttgaaggagttggcagaagcttatcggttagctgcaaaatctcctaacactattgttttagatacacccgttgctcatgctgaggatttaggtcttccgaaagatgcaaaaattttattggaaaattcaggcggaattgttggacgtactgccaaggctcgtcgaatttttggacaggatagtaaagaagacgcaaaaattcttcaaattattcgtgaagccatttttcaggctaggcatcgcactttttatcgcgcagatgcagttgtagggcttgatgaagcttttatgttacgtgctcatctaatggtaccacaagatgatattaataatctctactcttggcttaataattttcaagttcttaatgatacttatcgtgagcgtttaaagaaatcaaaacgctatgaagagactgatatttatattttttctgatccagagtggagtcatcctgattatccagatggtttggtttattttgataccaatcacaattgtgctgctattctgggactccattattttggagaattaaaaaaagcaaccttgactttggcttggggaacagctaatcgtaataaatatgttgcctgtcatggtggtttgaaaatttttgaaaaagaaggacaaaaaccttatgtggcctccttttttggcctatctggttctggcaagtcaactctcacacatgctaaacataatgggaaatatcggatagatgtcttgcatgatgacgcttttgttatttctgaagaggacggctcaacaattgccctagagcctgcttattttgataagacaaatgactacccagctggtcatcgcgaacagaagtattttgtagcggttcaaaattgcggtgcggctttggataaggaagggcatcttcgccttattactgaggatatcagaaatggaaatggtcgaaccattaagtctcgtttttcaacacctaaccgtgtggatcgtattaatcaccctattcagtccattttttggataatgaaggatgattctttaccacctcttattagggttaccgaccctattatggcttcaattatggggtgtactttggttacgacgcgatcaacggctgaaaatacgactgacagtttagatgcgttaattattgaaccttatgctaatcctttccgtgtctatccattggtggaagattatattaagtttcaacatttatttgaatcaggagtaaactgttatattatcaatacaggttcttatttgggacaagatattcctaaagagactacgttggatgttattgaacaagtggttgatggtactgcaaaatttgagtcttttggttccgttaaaggttttgagtacctttcttcttctcactataagattcctaattttgataaggcttatgtcaaaattatccgccaacggatgaaaatccgattgcaatatttggaagcttttaatcgaaaaaatcctaaattgtctttgcctgatgaagcaatctcacatttgaaagatgtcttggataatttaggttagttagtattgctattaagcttactcgtaaatctatttctcttctattgattgccttcttttttgctcgttagtctttgtcgagccgctaacagcagccgttccccttactgcttaagaaaagtgataaaaaataggcggcttttgaacaaatctatcaaaaaaatgaaaacagagcaatcaccaactctgttttcattttttatgtaaaatctgatttttaagatagacttctgaaacgtgtgcaaattttttcagttttttaagttcttcaggatgactaataaaggtaacaacaataccattttttcccatgcgtcctgttcgtccggcacggtgattgtatgcatctttatctcttggtaaatcaaagttgataactgtttcgagaagctcaatatcaatgccgcgcgctactaaatctgttgccagcaatagagagagttcatgatttttgaatttttctaaaatgactttgcggaatttaatattaacatcactggcaagtgaaacagcagaagcaccgctaaattgtagacgctcttcattggctcctaagtctgacagcctgttaaagaaaacaagtcccctaaagttaggaatgttagaaaatttacgcagcaattctccgcgttcacgcttagcaacagtgatataataatgagaaatggtgtctaccgtttgttttgataagtcaatctcaagggtatcatcagccaaaaatgttctatcaatgctatttgttgcactcatataaatcatctgatggtcacgaggaacacgtttcacaatattttcaacaaagtgaatttgagatttaccaagtaagtcatcaaattcatctagaacaattgtattaacgttcatcatcttaatctttttgagtttcacaaggtcaaagacacgcccaggtgtgccaatgataatttctggtcctttttttaaacgttcaatttgtcgtttttgactggaacctgataaaaaaagctgagctgttaaattaagaggttgagcccattccttggtaacttcaaagatctgtccagctaactcggtattaggagctagaatgagcaattgttgagcttttttaggtgtgagagtgagtaaactaggccaaagataggctaaggtcttaccactaccagtggggctgataccaagaagactcttaccatttttaatagggtcaaaagcagcttcttgaatggtcgtaaatgctgaaaaatgtttttggctgagtttatcttgccaaacgcttggaaattgtgttttcattttttgtctgcctcaaatacaataccggcactttgacgcatctgatagagaatttgactagccgttttagcatcctctaaccaagtctggtaaatgacctcatttttattgttcatcatttcagcaaagtgctttgcttcttccaacatgaggtgttcaatgtcaggaagagctaatttttcgcgactaccatcatgtttttggaaaatagcagagctgattccttgaatatgattcagtcggagagttccctcactggtataaatttcagcgtattctaaggtgttgtaattctttcctgccctaatggaaacatgaaaatcaggataaatcagattgccattgccgttcaaatcaatggtgttttccaattgtgtcgctgtgtagttgacacttttaggctttccaaaaagtttgatagcagcgtaaataggataaattcccaaatcaactaaagctcctcctgaaaacttatctgaaaaaacattgggcagcttgcctgccagtaaatccttcatttttgaagaatacttagcataggaaaagtcagccccgataactgttttgtgggataggaattccttaataagaaggagagattcttcatgataattacgagcagcttcaaaaaagaacagttgtttttcttctgccgagtggataatattgcttaactcctctggagttgagaaagccggcttttcaacaataatatgctttccagcttttaatgctaatttggcgtgttcaaaatgaagggcatttgggctggcaatataaagaacatcaaaagcatcgttaaaaaagtcatctagcatatcatagcaggcaatattttgataacgtgcagaaaaagcttctgctgtttctaattttcgtgaataaaccgctgttaattgatagtgctggctgagctgagctgcttcaataaactgatgcgaaatggatcctgtcccaataataccaagtttgagcataggtcgcctccgaatctttagatttttatttcattatatcatgatttagtgtaaaataaataggaatatagtttttaacaataagaaaggaaatttaaagataaagagctttagctttaaagtaggtcaagctgcctgattatttttatcaatcctttagacattaggatttttagcaagagctgttttgattgtatctttgtctctatcttttaattatgcgaaaaaaaccgattattattggtgtaacaggcggttctggtagtggaaaaaccagtgtctcacgggctattttggccaacttccccaatgctaaaattgctatgattgaacacgattcttactataaggatcagagtcatctgacttttgaagagcgtgtaacaattaattatgatcaccctttggcttttgaaacagacttactgatcaatcatttgaaagagttaattgctgatcgtccggtagatattcccatttatgactacacacagcatacacgcagtgaaaagagttatcgtcaagagcctcaagatgtttttattgttgaaggcattcttgtcttagaagatcagcgtttgcgtgacctgatggatattaaattatttgttgataccgatgatgacattcgtattattcgccgaattaaacgtgatatgcaagagcgcggtcgtagtttagatagcattattgagcagtatacaagaattgttaaacctatgtaccatcaatttattgaaccaaccaagcgctatgctgatattgttgttccagaaggtgtcagcaatctcgttgccattgatttaatcaataccaaagtggccagtattttaaacgaaacacattaatctagcttagactgtgttttttcatatctttaagtggctaacttcattttagaattttcaattgaaaagtcattgtttgatttttcagaaaatttcctgatttctattgacaatcattctaaaaaaaggtatgatgttaacaacatacatcgaaaggaaaaagtcaaatgtttacacgaaatgacgctttgttgttgaggtgtgagggctaatgcaaaagcattagtcctgtttggcttaccaagcgggaagaaaaaacatctcgcttgggtttctgagtgagatgtttttttactttattttttcaattagaaggtggtaatcttatgcgtaaggttgaatttcttgacacaacgctccgtgatggcgaacaaacaccgggggttaatttttcgattaaagaaaaagtagctattgccaagcaattggagaagtggggaatctctgatattgaagccggttttccagctgctagccctgactcttttgaagctgtgaagcaaattgcagcagcgatgacaacgactgctgtatcaggtctggctcgttctgtgaaatctgatattgatgcctgttatgaggcgcttaaggatgccaaatttccacaatgtcatgtctttattgcaaccagtcctattcatcgtgaatttaagcttaaaaaatccaaagaagaaattcttgaagtaattaaggaacatgtaacttatgcgcgctcaaaatttgatgtgattgaattttcaccagaggatgccacacgtacagaacttgatttcctattgcaggtagtgcaaactgctgtagatgctggtgctacttatattaatatccctgatacagttggctttaccacgccagtagaatttggccatattttcaagtatctcattgaaaatgttaaatctgaccgtgacattattttcagctctcattgtcatgatgacttaggaatggcaaccgctaataccctcgctgccattaaaaatggtgctggacgtgttgaaggaacggttaatggtatcggagaacgtgctggtaacgtagctcttgaagaagtggccgtagctcttaatattcgtgaagattactatgatgcgaccagtgctatcgttcttgatgagacagtgaccacttcagaaatggtatcacgtttctcgggtattcctgttcctaaaaataaagctgttgttggtggcaatgctttttcgcatgaatccggtattcatcaagatggttttcttaagaatcccctcacttatgaaattatcacgcctgaattggttggtgttaagaaaagttccctgccgcttgggaaattatctggccgtcatgcctttattgaaaaattaaaagaattgaagcttgattttgaagaaggagaggttgcacctctttttgcaaaatttaaatcgttggccgataaaaaacacgatatcacagatgctgatattagagctttggtagcagggactagtgttgaaaatcctgaaggtttccactttaaggacttaaggctgacatcaaatgatgacgacacgatcacagcacaagttattatggtcaatgagggtgaggaagaagtaactatcattgctaatggtaagggttctgttgaagctattttcaatgctgtcgataaattctttaatcaaactgttaagttagatagttataatattgaggctgttactgatggtattgatgctcaggcacgtgtgctcgtttctgtggaaaatgttgatacggataccattttcaatgcttctggtcttgactttgatgttttaaaagctagtgctattgcttatatcaatgctaatacctttgttcaaaaggaaaatgctggtgaaattggtcacaaagtttcagaacgtgattatccaagtaatgactaggagaggaaaatgaaaaaaatcgtaacgctggcaggagatggtattggtccagaaattatggcagcaggtttagaggtttttgacgctgttgctcaaaagattaactttgactatgaaattgaagcaaaagcttttggaggtgcaggaattgatgccagtgggcatccgcttcctgatgataccttagcagcagcaaaaactgctgatgcgattctattggcggccattggcagtccgcaatacgacaaggcacctgttcgtccggaacaaggtctgttagctatacgtaaagaacttaatctttttgctaatattcgtccagtgcgtatttttgatgccctcaggcacttatcgcctttaaaagcagaacgtattgctggtgttgattttgtggttgttcgtgaattgactggtggtatctactttggtcaacatactttaactgaaaattcggcatgtgatattaatgagtactcagctagtgaaatccgtcgaattatgcgtaaggcctttgccattgcacgtggtcgcagtaaaaaagtaaccagtattgataagcaaaatgttttggcgacttcaaagctttggcgacagatagcagaagaagtagcaaaagaatattcagatgtcactttggagcatcaattggtggacagtgcagccatggttatgattactaatccagcttgttttgatgttgtagtgactgaaaatctttttggggatattctgtccgatgaatccagtgtactgcctggcaccttaggggtcatgccgtctgccagtcattcagaaagcggtcctagcctttatgaacccattcacggttcagcacctgatattgctggaaaaggtattgctaacccaatttctatgattttatcagttgctatgatgctgcgtgacagtttcggagaaactgctggtgctgaaatgattgaacacgctgttaataaaaccttgacgcaggggattctaacgcgtgatttaggcggtttggctaatacaaaacagatgacagctgctattattgctaatctctaatgccagtatttttttggtatttgttaagagaataattgtttatcatcagataaaaaagatttttgattaagctatttggtaatagatataggtatgattgtaatgacaattttggagagtctagtatgagtggaaaatcaatttttgataaattatgggatcgccatgtgattaccggtaaggaaggagagccccaactcatgtatgtggatcagcactatatacatgaggtgactagcccgcaagcctttcagggcttgcgagatgctggtcgaaaagtgcgccgtcctgatttaacttttggaacatttgatcacaatgtaccgaccgttaatatttatgatattcgtgatgttatttctaaggcacaaatggatgctcttgctagaaatgttatcgaatttaatattcctcatgcagaccatggttctgaaaatcagggaattgtccatatggttggccctgagactggtcgtacacagccgggtaaatttatcgtttgcggagatagccatacggcaacacatggcgcttttggtgctattggttttggaattggaactaccgaagttgagcatgtttttgcgacccagactatctggcaggtaaaacctaaaaagctcttggtaaaatttacaggaaaaccacaaaagggtgtttattccaaggattacattttagccttaattgctaaatatggtgtggctttaggtgttggttatgttgttgagtatattggtgatgctgttgatgccctaagcatggaagaacgaatgactatatgcaatatgtccatagaatttggttctaaaatgggaattatgaatcctgatcaaaagacctttgattaccttaagaacaaagcgtgtgtccctgaagattttgaaacagcagtggctgattggaagactttggtttctgatgaagatgctcattacgacaaggtgattgaattagatgtttctcaattagctcccatggtgacttggggaactaatccttcaatgggagtcgcttttgggcaagcttttcctgatattagagatatgaatgataagcgggcttatgattatatggacatgaagccgggccaaacagcagaggatattgaacttggttatgtttttttaggttcttgtaccaatgcgcgattaagtgatttgaaagtggcagctaagtacgttgctggtaaacatattgctcctaatttgaccgctattgtggttccgggcagccgtcctgtcaagcaggctgctgaaaaaattggtctggataaaattttcttagatgctggctttgaatggcgcgatccgggctgttccatgtgtcttggtatgaatcctgataaggtacctgaaggcatgcactgtgcttcaactagcaatcgtaattttgaagatagacagggagttggagcgaaaacacacctttgcagccctgctatggcagcagcagcagcaattgctggtcgctttatagatgttcgtcaattaccggaggcacaagtttaatatggaagaatttacaatttatacaggaacaacggttcctttaatgaatgataatattgataccgatcaaattttgcctaagcaatttctgaaactcattgataaaaaaggttttggaaaatatctgatgtatgagtggcggtatttggataataattatacagaaaatccagattttatttttaatcaaccagaataccgcgagacgagtattttaattacaggtgataactttggagcaggttcttcaagggaacatgcagcttgggctttggctgattatgggtttaaagttattgtagctggctcttttggagatattcactataataatgatttgaataatggtattttgcccattatccagcctaaggaagttcgagataaactggctaaattaaaaccgacagatgaagtaaccgttaatctttttgaacaaaaaatctattctcccgtaggagatttttcctttgatattgatggggaatggaaacataaactattaaatggacttgatgacattggaatcactcttcagtatgaagacctgattgcacagtatgagcaaaaccgtccaagctattggcactaaaaaagtagataaaacaatcattgagtgatgagatatgctatctagaaaaaaataagagaggccttatgatgctttagcaatcagaaaaagctctcttttattttctttagaataaattaaaaatatcttgaatgtggcgtaggagtaagttggaatagtttttgtcggactggctatctttgattttctccttgggaagtggttaggtaatctgtaataatgccattgacacccatcaaaatcatccctgtcattactgattcattgttgactgtccaagcgtaaatcttcttatgattggtcagcagtttggtcatgaaattttggtctaaggaaaagtattccatcgtatagccgttggctttggttctggagaagatagacttataaggaaggatgaagtaagcgacaagagatttatcatattttttaaccttatcaatgagatggtaatcaagcgaatgaatctgatgtttgattggtttagcgtatttgttgagaaaatgtgccattatcttctttgaatcttgagaagatgttttgatttcaatgagtaatttttgttctaactgatttgctttagtgagatagtcatcaaagcttgtcatttttgtgctataaccattttccgagacagtaatttgcaagaacagcatctttagaagactataaacttgccttttgggaggaaaatagcgtttgattttcataggacttactgctataatagaagttgtcagaaaatacagatattaactagaagaggaaatttttatgactaaacatatccattgggatggcaatctttcacaagaaggctttgaaattgttaagggcgaaggcggtgtaatcgtttgtccaactaaggttggctacattatcatgacttcagataaaaaaggtctcgaacgtaaatttgaagctaaaaagcgcaatcgcaacaaacctggggttgtcctttgcggcagtatggaagaattgcgtgccttagcccagttaacaccagaaattgatgccttttatcaaaaacattgggatgaagatatccttcttggctgtatcttaccatggaaagcagaagcttacgaaaaattgaaagcttatggcgatggacgtgaagaactgatgacagatattcgcggcacctcttgttttgttattaaatttggcgtggctggcgagcaaattgccaaagaaatgtgggaaaaagaaggccgtatggtttatgcttcctctgctaatccatcaggtaaagggaaccgcggtaaagtggaaggtattggtgaacgtatcgaatccatggttgaccttgttattgaagctgatgattatgtcgcttctatccagcctgataagacaattgaaacgcgctatgagcaaggtgttatggtctcaatggttgataaagacggcaaattaatcccgcaacaaggagcggatagccgttcagtagagccgtgccctgttgttatccgtaagggtcttgatattgataaaatcatgatgcacctatcagatcagttcaactcttggaattaccgacaaggtgagtattattaaaaagcagcagtccttaggactgtttttcaatattaaaataggtaatgtaaaatcactccgcaagggtgtttttgctataatgaaaaggtaaaattcaaaaagggaaatgaataaaggatggtcaaagacttatcagatatgagtttaaaggaactctggcaattattccctatttttcttgttgaacacaaagaggaatgggaagattggtatgaagaagaaaaagaacggcttttacacttgcttccaagtcaaagtatcaaaagtatttcccatattggcagcacagctgttcctgacatttgggctaaaaatattgttgatattttattagaagttcctgaaaaggaagatttacaagatttcaagaagcggttgctggatgctggttatctcctcatgtctgaaggtgagaaacggttatcttttaataaaggttatacaaaagacggctttgccgagaaagtatttcaccttcatttacgttatcaaggggataatgatgaactgtattttagagattacttaagagagtatccggaagttgctaaagactatgaaaggttaaaacttggcttatgggaaaaatatgagcataatcgtgatgcttatactgatgctaagtctgactttattaggaaatatacacaaaaggctaagaaaaatgataaagggaaagacaatgtcagatgttttgaactgctctctgccaatggacaatgaaataataaaaattaagaaatggccttgttcctcatttcaataagtgatctaaagcctgtctggaagaagcggaatcaattgtcagtagagaatgaacgagaggttgctttttgattttaagtgagtattagttatgggaaaaaggtgtcaaatcaacagaatttagtttgaatctaagctctatttttaagtttgtagattatttaataggagatataggctgtacttttttgaaaaaagtgtacactaaaatcactaacttcagactgccccaaagtaagttctccctatctggcaattcggttgagacagaacctttctatttagttgttaatttgttatgagtttgattgcgactagagagggtttatgttggataagttttagtgattgaatgatattctcaggatttataggagagatgccaagtaacttagctaattcttcaatgtagacaaaggtaaagatatcataggctgattgattattcagagtggcacgcctaacgccgttaacatgtgggttaataatcatcttgtgttaagttagcaaaagaagttcctttaggcaaattatcccgaatgagggtgtggcttttctcaatatgtcctttctagtcaggacgattgaggcacagaagagtagtagcttagactcttctctcacatcaaacttgatattatccaccctagtgaactctcccacgttgtcagtaagaataacaggagaaagcttcaaagaaatccttattcccttcataaccacgataaaggcgtgaaagcttatgttccaccttgtcctcttctggtcattttttacttacaataagtgatccaatagtggtcaatgatacactcctcatatagtggacagtgaaaaaccaaaaattcactagaagttataaggggagttttcttatgtctaaaagaagttcaaagtctgtagctgaaaaactggagattgttttgttgtacttggaacgagagagatccatttcaaccttaacaaggcattctggagtagatcatcaaaccatcaaagattgggttagaaaatacaaaggatcagacatagagggtctcaaagagtctagaatttgaaagaaatatagtcaagaactgaaggaacaagccattcgggattaccttgagggtcaaggaagtttagctcaattgttgaaaaatatggggtctctaattttcatgttccataaggtggataaaacggtatactagtggtgaaacattaccaaccactcgtaaagaacggactcgtatgaaacaaggacgcaagacaacttttgaaggacgtattgaaattgtcactttcacaatggttcacaataagaactatcacgcggcggttgagaagtatgggggctcttaccaacaagtttactcatgggtgagaaagtttaagaaagatggcatcaatggactattagaccgacgtggaaaaggtcttgaaagcaaactaatatccgtcgttattgtggctattgtactaagaccagtttgataaacattgaagagaatagtctcaattgtgacttcacagctgaagcaccgaatcagaaaaggtgtacaggtgttaccttcttgcaatacgatcttgcccctcttgaaaagagagacaaggccgttgaaaagaaccacttataatggacagtataaaaaagttatatactgttcttataaggaggttcttttcatatggccaaaaaaggaagcaagttcactaagtattcatcagaattcaaattacaggtcgtaaaagattaccttagtgggaagagtggagggatgccttccattgtcaaaaaatatgggttaaaatcagataatcagggactaacttggacaaggaaataccgcgaaaacccagccctactcacacaagatttacgaggcactaagtccactggtcgtcctaaaacgagaaatctagatgagatgtcactagaagagcagaatgcttatctacacatggagaatactattttaaagaccttaaggcctctcctcagaaagtgagaagaggccatctttatcaagtcgttgatcggttaaagaatcgttaccctgtctcctctttatgttcctattttggtttcccaaggtcatcatacctacctctggttaagcaatgggaaacctgaatataagcagtttgattcaaacctcgctcaaaaggttatagacctcttccatgatactcagaaaggttatcgcttcatctgttatcaactcttccgtaacccaaagactattttacgctatatgcgtattcttggtcattactcacctattcgtaagaagacgtatcattcttgtactcaacgagagataactgaaaaggcaagacacgtccactacaacgtgcttgcccgaaactttaaagcagaacgccctccccagaaactaacaacggatgtcagctacgtttactacaactatgggaggatgttcctgagtgtcataaaagattgttatgacaattccattttagactatacgctatccgatttcaatgataacaagttagtttttgataatatagatcttgtatttaataatttctgggattcaactaaggtctgcattcttcattctgatcaaggatttcaatacaccaatcaacaatatcttcgaaaactagaccaatatggagtgaccatttctcattctggtaagggaaatggttacgataatgcagcctgtgagaatttcttttctcacttgaagagtgagtccttaagaccattttcacctaaagacaagagaacactcatctctcaaattagggaatacattaactggtataactaccacagaccacaagagaaattaaaaggtatgactcctatctatggaattcagggagtcacaccttactaaataatacgctttttatactgtctattttagatggggcttgacagttgcctaatcttttattatttcattgtccacttgacagggagcagttcattatagtctctaagagtcctttttgattctctttaacagctaagcaacagtctgcctacttcttgataatcttattggcaatgactttctgaatgcccatagcgtcaatactaattaggcaaccttttactgataagtgttctaataaatctggtatagctgtgttttcacttcccttatcatcacagttaccacttgatcataacagatgcccaagtctgtcgcataagcagagacaacatgtaacgctttttggactggcattgcctctcattgttttgccatcaaaagccagcagcaaaggttgggaaggttttagctgataactctgcttcttgaagcatttctgactacatcagagttgaccctcacaagaacttgattatctaaggtcgcaaacacgccttgcagcgtatcatggatggaataccattttctagcttaagaacacgacgtaaagaagaccagacccataggctttccaaagtcttcaatatcttaccattatcggctgctgtcaggtgagcaaagaaaatcaaaagaactattagacaaacagtgtttgattttccaattcttacgatcatcatgtaccgcaatcagaaaattaaggatttcagtcattcaaaacatctcctaagtctattatccttaagaggagagtttgtgcttgtgaaattattctctgaaaacagtcttttcttcatgcatttgacgtgcttcataacagttattcttgatgagaggtgcttacgaatttctttagaaacagttgaaagaatcttgccaatttgtgatccgatctcatgaaaagtcttttaccgttcgatgcccattgaatgtcattacgacggtgtctgagagggttaaatgtttgtgtttcatcttagtaagtcctatttgtcccagactaagttctacactattttgtcatttcagtctaacttcttgtttatgatgaaaactagaacttactttaggaattatccttctattttctttatgcgattggcgtgattttttcttgacattattctttaatttttatacaataaagtttgaaatataaatataaatatttcaaacttatgtaaaaggagaattttgtaattttacatgttgattcattatcttattaagcaagctaaaaaacctagcggtgctgttggccgagtaattaccaaaatctggtcttcctattttaaagatctcagtctctgggtgatcagacagacggctatctcagacaatagtcggattttagaagtaggctatggtggaggtagtaccatcaaaaatcttatcgctttaggtaagaatcttgagattcatggaatagatatctctaaagaatcctatcaaactacaaaacggattaatcgagagtcagtacagaatggaagtgttcaacttaaaattggaagtgtagaggccttaccctatcaaaatcaatattttgatgtcgtattcgccatccaaacccatcttttttggaaggatctaaaaaaaggttttcaagaaatttaccgagtgatgtccagccattctattttggttgtcgcttctgaaaaagataaaataaactatcacatgacaatgtatcaaacaagccatgagctgagtaaattgctaaaaagcattgggttttcaaaaattgaaaaaagtaaaaatcaggattggtttttatatactatctataaatctgaagagacctaatcggaggaaaagatgaacattattgaatttaaaaatgtatcgaaaagatacaaagtaggaaatcaggaaattgaagcagtaaagcatgtttcattcaacattgaatccggagaatttgtagttgttttaggagccagtggcgctggaaaaagtactattcttaatttattggggggaatggatacagtatctgaaggtcaaatacttgttgaaggacaggatattgttaacttcagtgaaaaggaattaacaaaataccgtgctgaaaaaattggttttgtttttcaattttataaccttatatcaaatttgaataccctagaaaatgtggaatttgccatagaggtatcccaaaaatctctgaatccaaaggatattctaaaaagagtaggattgtctgaacgattaaagaactttccttcacaactttcaggaggtgaacaacaaagggtatcaatagcacgagccattgctaaaaatcctctgttattactctgcgatgaacctacaggagctttagattatgaaactgggaaggaagtccttcaattgattaaggaattaaacgaaagtaccaaaaagagcgttgttttaatcactcataatagtgctatttcaaaaattgccgataaagtcattcatgttcgaagcggacaaatcgagaaaattgaatataattcagataaaattccagtttcagagttagagtggtaatatgatgaaaattttattaaaaaaattatttagagatattcgtaccaatatagcacaatttataacaattattttaattgtttctattggttcttttctttttgttggcttgtctagtgttgccagtagcttaagagattatacaaaaaactactatcatgactatcacctgagcgatgcaacagtaaattttatttcgcttacttcaaaaaagatagatgctattaaagataaatatactaatatacaagaggcagagggacgtgttaattttgaaggaaaacaaactttcaaaaattatagctctgctttaacaatttctagcttttctcctacttctaagctaaatcgttcttatattgtgcagggaagaaaaaaactcaataacaacgaaatcttgttagatagtgattatattaaggcgcatcattataagatgaatgattctatacaaattcaaatcaatagtaagaagttcacttttaaaatcgcaggaattattgagaatcctgagtttgttatgaaagtatcaggaaataatttaacacctgagcctcaaaaattcggcataggttatatcacagaacagaaagctttcgatatttcaaaaaaaaatcattcttataatcaacttcttttaaagattaagggtaataatagtaaaaaggttcttcaaaaactttctgaagattatgatacaacttatatttctggtcttgttacaactgaatcaagtaactacactaatttaaaaagtttaatcacaaccgatgaaagtcttagcagggttattcctatcttattctttattgttgctgcggtcattacttttatttcaatgacacggctcatacaacaaaacagagtacagacaggaatcatgcgctccttaggtaaaagaattagatacataagaagttattacttattctatactttattgacaagttctattgggacatttattggaagtgtgctagcttactttgcttttactgatattggtgaagctcaagtatcttcattgtatgctttaccaaattatcatgtgaagattgagttacaatctttgattccttctttttgccttgttttattatttggtttattagctatttatttttcaacgcgaaaagttttaaaagagagaccagcaaatttgattagacaggagcctcctaaaaatattaaaggtattttattagaaaggattcctttcttatggcggtatttatcttatggaagtaaatatgttattcggaatattttcttaaataaaatacgtttttgccttaatttactaggtgttgctttatcttttttgatgattatattagcttttggttattataacgctatgactactgtagttaatacggaaattaatgatgtcaatacttataatattagtattatttctcctaaaattaactctatacaagataaattatcaaataatccacatctaaagtttgaaaagttagatattcaaaagttagaacttggacaaggaaataatagtattgcaacgactttatatgctagtagtcaaaaagagcattttatgaaagtttataagaaaaacggtcaagaattgtctcactattcaaatggcattgtcataccaaaggtttatgctaataagcttcatttaaaaattggggataaagtaagattagccttttcaaatactcaacaatctcccataaaagttagagtaacagccatatcaacccaatattcttctaaatttattgttgctgacgctgactatttgaaagaacaaggcgttacccttcacccctcaatgctattaatccaaaaaggaaaaaatagtaatgaaaaaacatcccaattaattcaatcggccaaagttattgataaggatttaacttatacaactaaaaaggatgttcgatcaaatatgaatgctattttatcaacgacatttccaatggttgttctatttcttatttgtgccatgtcattaacagtagcgactatttataatatttcatctattaatatttttgatcgaactagagatattgccacactcaaagtgttaggctactctaaaaataaagtgaataaccttatttttaaggaaaatataattatttcttgtgtagctatgggctttgctttacctgtcggtcattcgctctttatcctttttattaacgctatgacgacagaactgcaggctatgccgaacgaattaccatattggtgttttgctttagctattgtctgtgttttaggaatcaccattttatcaaatttacttttgcatcgaaaggttaaagccattgatatgattgaggggttaaagagtgttgaataaaatcacaaatttgggcaaaaactagtccttaagtaaaaccacatctgttttgacggctctcaccaaaaagagtctgagacaaaaagatttctcaaactctttgattagtgactttagtctgtctcgctccgtaggtgcgagacaaataaaccacccgctatgcgggtgcgcattgaatgttatacaaaaaatctccaaacgcgatacaataaaggtgttcaagcctattgtaaagcgaaaggagcaaaaaatggcacaaaaggcacatagtttatcacatacaaagtggatatgttctatcaccttgtgttcacccctaagtatagacgaaaaatcatctataatcaatatcgaagtagtttaggcgagatattccaacgattatgcagttacaaagatgttgaaattatcgaaggccatctgatgccagaccatgttcatattgttggtcagccttccaccaagaataagtgtttcaagtttcatgggctatttaaaaggtaagagtgctcttatgatgtttgataaacacgctaatctcaaatataaatttggaaatcgccatttttgggcagagggctattatgtgagtacagtgggacttaacgaagccacaataaagaaatatatacaagaacaagaaaaacatgatatcgcacttgataaattgagcgtgaaagaatatgaagatccctttagggataatggcaagtaataccatagcccctttgagaggtaagtgacgagtcaaaagcagttaggcttgaacaaagtgaaagccagcgtctttaggcgctggctggtgatgtgggcttatagccctcgtccaaaccacccgttagacgggtggttatgatttgaaggggagggtgtctagattgggtgtcagggaaaagaccagcatttgaagtttagatggggttatatccttatatccatgcaggagatcgttgccatagccaacgtggcaaactcatcaaacctgttcaattttggttatttttggacaagcaagaacttgttttctcaaatgaccgactatcttaagacgtagtacggacactatggtctcaaaaacatggttattatcaacgatgattcaggctacgaagccaacaggtttgaggagttgttgggacggcataagagctttgcttactgctttgattcttaccacgtggtgaaagtatgtcacaggcaagtactgctttagagatgcacttgcaccccgattggataactaaggaaatggatttaagactttagaaaactttccgagggaaacttggtacaaacaaaaatgaaatttgagcaatatatttcatttttatgttataatgatggcgaggtattcaatgaatcaatatcaaaaaacaacagagagaaaaaaacaagctattattcaagcagctttgcatttatttaaagaaaaaggttttaaagggacgagtatcaagtctattgcaaaggcagcacaagtatctcctgtttccatctacaattatttcgaaagtaaagagagtttagtagatttatgtgttaataaactatttgaagaaattacacaggaagctgaaaacattttaaccagtgaaatagattttaagatgaagttatgtcaagctttagcgttatgtcaaaaaaaaatgagtcatcagatttctgtctattttaaagaaaaaacgataaaagatcctactttttcaaaattattaacgaaagccattgttgccaaaaaacgtgagatttatcgttcttatattaagctaggaaaagatgaaggagttatcgctaaagatttgtcaacagaacttatattaaacgttatggatgctctcaatagtattggaaatcaattatcagaaagtgagaatttaggagaagaaattgaacaaattcatcggcttttcttgtatggaatttttggaaaaatttaaggttttaaaacaaccgagaaaggccaataatatcagtaagaatcgtgtagccatgatttttctaaccattcataaaagtaggggctttcttagttcgccttattagttttgtacatgatgtcaagttcaagtatcaagttttaataagacatattcactttaacataatttataagtagtgaagaattttccagatagagttttccagatagagttttcttctttttgataggttaatttttttctcaattcctgctaatttcatattaaaattatgttattagtcagattgaaaataaactttttttggggtgcttttctattaatactcagaaggatcaattaaacaaaccttaaataaaaccaaagggcatgactaaaaatagcttctataaagtctttattttggaaacgacagctgccattccttaccgtaagtagtaaaacggtgcatgttatcggctaaagtcaaacggaaaaaccaacggtaggcattgttcacctcaatctctttaatggtttatggagcgaatatggaaatactgaaacagaggaattttaatcagcatgataaggtcaagactgtgacgatcattatcgaaactataagtattttctaccaaatcatagataaatgaaaaattaactacatccacttgtatgagaaaatggtcatctggaacaaggtcagctaggatgtagaagccatattgcttgcgattataatcaggattttccttgtgaaacatatgagcattatggcactagtcccataaaatgggacagtagaaaaacacttctgttgaaatctagtaaactagaaacaggagtgttttattatggtcaaaaaagcctattcagtggaaactaagttagcctgtatcgaaatgaaaaaggcgggtaagtctaacaaggtcattaaggagactttgagaattaagaatgatagtcaaatctacacttggatgagatggtatgaaaacgacgaattgcaccgttttcatcaagctgtaggcaaacaatatacctacggtaaaggtatggaggaactatctgaagtagaacaactacaactacaggtggaattcctaaaaaagtatcggaacttggtaaggcaaccgacaaagtaaatcttatcaagccagtggaagactacaagaatgtctacccagtgtctatcattctagactgtttcggcgtcaaacgctcaactttctaccgttggaaagcaaaaggcgaaaaacctgagaagagagacaagattgtagaaaaaatcgagcaactctgtatgaaaaatcattttatctacggttatcgtactattacacgactacttaagaaaatccatggactaatcgttaatcgcaagaaagtctatcgaattatgaaggaaaaaggctggctctgtcgtgcacgtcctaagaaagtacaaatctaggtaagccttactatgtgacggaaaacaagctaaatcgtgagtttcaagcagaaaagccactggagaagctagtcacagacattacctatctctactttgggagctgtaaacgctacctatcctccatcatggatctctataatcataatcgtgaaattgtagcttacactatttcggattgccaagatattgactttgtactggatacgctcaatcaattggaattgcctaggggagcattttatacagtgatcagggctctgtttacaccttaaaagcctactttcagacctgcacagaaaaaggcatcatccgctctatgttccgtaaaggaacacacacctacagataatgcctgtatcaaatggttccattctgtcctaaagtatgaaaccttctatctccataattggaaaaacttaaccaaagatagtataacagatattgtcaaaatgacatcacgttttataatgaaactagaattcaacataaattaaacgaccaatctcccatagagtacagaaggtcggccgcctatggacttgtcaagaaaaagtagacaggaagttaagtggattagtgattatttttttcaaactctattggtaattgataccccaaggccgagtggatacgtttcggattgtaataggtttcaatctatttaaagatttcaagttgggcttgttcaatggatgcaaaatgcgcatcgttgacaagctctctttttaaggtcttgtaaaaggatgccatgagtgcattatcatatggattaccttttcgactcatactagactgacattttttctgcgtcatcagatcttgaaatcgtgcttcagtctattgagaaccttgatctgtatggactattaatcctttcttaggtctttctctatgataagcttgattaaaagcatctgttaccaactggccttgcatatgatttcccatcgcccaacctacaatctttcttctatagatatctataaagacggatacagataaataaagtgttcctgcttttgtcggaatataagtgaaatcccctagccagatttcatttttaccttttgtttgaaaacacggattaatcaaatttggacgtctcaatgaggaacgtcgacggttatagtacttgtatttatagcgggcttcctttagcatagagacaaagttcatgaaatagtctagcaatacgtttgcgattgacccttattcctcgtcgatagcgttctttatgttcatagaaaatagtcttaatgatttcctttaacgcttcattctctatctgtcttgaagatggcttacgctttgggcatgacgaagagcgctcccctgtcctgagaacgctctttctccatatttttcgtcttcttgaatccagcgatataaacgatttttggatgaactctaaagttgaactaaccatttttacagactgtccttcctctagaatgagtttaactgcagctattttgaatgctttatcaaatacttctcttggcatcatatttttcctcgttttcacttaacttcctgttcactttattataccaagtccactaatagtgtttttctactgtctcatttttggggtgcagtgccttaccttacaattcttttttattataccgtaaaacataaagagaagcccttgaaaaatgatttctaagagctttgtcttcagtctaattattggtttctcttctttttataggtaatttaaaattgagtttgatacatcaatagaaatttttttgtaaaaatatcaggagattctggtattggctgtgtgatccatgtttcaatagttgctaaaatactattgacaaatatatcagttagcatttccttaggaaattttatattaaataactgcagttctaaattatcgtttacccaagatagatattgctttttcagagccatgcgccagacagctcctgaagctgtagaataaagcacatttagccaaattctataatgaaagagcaacggaaaaagataagtacaaatattatctaaaggttgcatatttaaatggttctttgaacatatttcaagtgcctccattatttttttattgatttcgtaacatatagaagatacaatttcatctggattattaaagtggttcttatagattgtttgtcttgaaatacaggcttcctcagcaatttcagaaaacgaaaaattggttcgttttggatacttagaagctagtctaaaaaaagcatttataatattttcccttgttcccttagtcataaaaccttccctctccttacttagtagtataaactattttttatcaaaaaacattacaatttgtaaacaaaatttgtaaacaataattataaaagaataattttaagtacgaatcatagttttaatattagattacaaaatttattaatctcataagattttagcaacttgctattagtatatatggtctgtgaaagtatttattctatattatttaaatataaatagataatgattatgtacaaactgtcaaaaaaaagaactagagaaaaaagaaactgaatgatattatgataataaattcaggttaataatctagtcataatgaatttagacctaatcggaggaaaagatgaacattattgaatttaaaaatgtatcgaaaagatacaaagtaggaaatcaggaaattgaagcagtaaagcatgtttcattcaacattgaatccggagaatttgtagttgttttaggagccagtggcgctggaaaaagtactattcttaatttattggggggaatggatacagtatctgaaggtcaaatacttgttgaaggacaggatattgttaacttcagtgaaaaggaattaacaaaataccgtgctgaaaaaattggttttgtttttcaattttataaccttatatcaaatttgaataccctagaaaatgtggaatttgccatagaggtatcccaaaaatctctgaatccaaaggatattctaaaaagagtaggattgtctgaacgattaaagaactttccttcacaactttcaggaggtgaacaacaaagggtatcaatagcacgagccattgctaaaaatcctctgttattactctgcgatgaacctacaggagctttagattatgaaactgggaaggaagtccttcaattgattaaggaattaaacgaaagtaccaaaaagagcgttgttttaatcactcataatagtgctatttcaaaaattgccgataaagtcattcatgttcgaagcggacaaatcgagaaaattgaatataattcagataaaattccagtttcagagttagagtggtaatatgatgaaaattttattaaaaaaattatttagagatattcgtaccaatatagcacaatttataacaattattttaattgtttctattggttcttttctttttgttggcttgtctagtgttgccagtagcttaagagattatacaaaaaactactatcatgactatcacctgagcgatgcaacagtaaattttatttcgcttacttcaaaaaagatagatgctattaaagataaatatactaatatacaagaggcagagggacgtgttaattttgaaggaaaacaaactttcaaaaattatagctctgctttaacaatttctagcttttctcctacttctaagctaaatcgttcttatattgtgcagggaagaaaaaaactcaataacaacgaaatcttgttagatagtgattatattaaggcgcatcattataagatgaatgattctatacaaattcaaatcaatagtaagaagttcacttttaaaatcgcaggaattattgagaatcctgagtttgttatgaaagtatcaggaaataatttaacacctgagcctcaaaaattcggcataggttatatcacagaacagaaagctttcgatatttcaaaaaaaaatcattcttataatcaacttcttttaaagattaagggtaataatagtaaaaaggttcttcaaaaactttctgaagattatgatacaacttatatttctggtcttgttacaactgaatcaagtaactacactaatttaaaaagtttaatcacaaccgatgaaagtcttagcagggttattcctatcttattctttattgttgctgcggtcattacttttatttcaatgacacggctcatacaacaaaacagagtacagacaggaatcatgcgctccttaggtaaaagaattagatacataagaagttattacttattctatactttattgacaagttctattgggacatttattggaagtgtgctagcttactttgcttttactgatattggtgaagctcaagtatcttcattgtatgctttaccaaattatcatgtgaagattgagttacaatctttgattccttctttttgccttgttttattatttggtttattagctatttatttttcaacgcgaaaagttttaaaagagagaccagcaaatttgattagacaggagcctcctaaaaatattaaaggtattttattagaaaggattcctttcttatggcggtatttatcttatggaagtaaatatgttattcggaatattttcttaaataaaatacgtttttgccttaatttactaggtgttgctttatcttttttgatgattatattagcttttggttattataacgctatgactactgtagttaatacggaaattaatgatgtcaatacttataatattagtattatttctcctaaaattaactctatacaagataaattatcaaataatccacatctaaagtttgaaaagttagatattcaaaagttagaacttggacaaggaaataatagtattgcaacgactttatatgctagtagtcaaaaagagcattttatgaaagtttataagaaaaacggtcaagaattgtctcactattcaaatggcattgtcataccaaaggtttatgctaataagcttcatttaaaaattggggataaagtaagattagccttttcaaatactcaacaatctcccataaaagttagagtaacagccatatcaacccaatattcttctaaatttattgttgctgacgctgactatttgaaagaacaaggcgttacccttcacccctcaatgctattaatccaaaaaggaaaaaatagtaatgaaaaaacatcccaattaattcaatcggccaaagttattgataaggatttaacttatacaactaaaaaggatgttcgatcaaatatgaatgctattttatcaacgacatttccaatggttgttctatttcttatttgtgccatgtcattaacagtagcgactatttataatatttcatctattaatatttttgatcgaactagagatattgccacactcaaagtgttaggctactctaaaaataaagtgaataaccttatttttaaggaaaatataattatttcttgtgtagctatgggctttgctttacctgtcggtcattcgctctttatcctttttattaacgctatgacgacagaactgcaggctatgccgaacgaattaccatattggtgttttgctttagctattgtctgtgttttaggaatcaccattttatcaaatttacttttgcatcgaaaggttaaagccattgatatgattgaggggttaaagagtgttgaataaaacaaaaaaagttgtcctattttgtattcctcatgctggaggtaatagtagtatctttaacaaatggagcgggtacatgcccgataacattatttttaaaccaattgaattaagtggtagaggaaagcgtttgaatgaaaagttagatactagttttgaaggtatggttggtgatgtttttaattctatcaaaaaaataatggttaattttgatatggattattacatttttggtcatagtatgggagcttggatagtgttagagttactttattattttaaagaataccatttactttatccaaaaggagtaatactttctgggaatatcccaccttgtttttatcataagtctgacccaccacttcatttgttaccagataaaatatttctagaagaagtctcaaaattgggagggatatctggaaaaataataaaagaaaaacaatttgtagaatattttgttcctattataaaaaatgattttaaattgatagagaactattattttcaacagaagcaggaaaagtttcctgtaaaaagtctgatttgtagtggtaaagatgataaatttcgggtaaaggatttggtacaatgggaaaattactttattgataagtgctcaatatctttatttaaaggtggccatttttacatcgatgacaatattgctagtctttgtaatcaaataaaagattttatttatatgtagaaagtaggaaaatgatgttaatacaatgccttaatgaaactattttgagagaaccagaaaaagggatttattatttagaaaatggtaaatataagtttgaaacctatgaacatttacgaactaatgctcttaactatttaggtgcactgcaagaattaggaattgaagaaggacaggaagttgtttttcagactacacataataataaattcttatatttgttgtgggcctgtttcttagggggatatattgccataccaactgggtttgattccatagaatatattcaaggaacaaataaagttattagtaagttaaaaaagccagtccttataacagagttagagaagcagtgtgaaaatatagtattgaaagataaattttctttatcttcacttgatactaaaaaaataacaggtagggtaacccaaaataattcaaaagatagaattgttatggttcaattttcttcaggttcaactggggaaccaaaaggggttatttatactgataatacattatctactaatatgttttctattttaaaatcaaccgaatggaaaactgaagagaggattctaacttggttaacattaactcataatatgggacttgcttcaggacatttggctcctttaataaagggaatgaatcaatatttaatgccgacacgtgaatttattgtacatccaataaattggctatatcaaattgataaatacaaaattaatattgtttcttgtcctaattttgcctcaaaattattgataaaaacattaaatacaaccaaaattaatgacgtagatttatctagtattaatatgattattaatggttcagaaccaatagattatggattatgtgaggaacttactaagcatttgtctaaatataagttgagggaaaattgtatttacccagtgtatggattagcagaaaatacagtagcagcttgtttgcctaaagctcaatcaccattaaaaacaataacaataggacatgaaggggtgacagtcggggaacctgctattataagaaaagagtcagaaggttatagagttgtttctgtaggaaaagccatatcggaaacagacatccgaattgttgataatgataataaaattcttcccgaaggatattatggaaatattgagttaaatggattgagtgttacaccaggttattacaataatgagaaagagtcagaaaaaatatttagtgatgatgggtggttaaaaacaggagatcaaggtttaatttttgataatgaattatatatatttggtagggaaaaagaaattatcattatatatggacataattattatccaaatgatatagaacaaactattgttcaaaaaattccagagttatcaggaagagttgtaattattggtgtcaacaattctaattcaaatgaagaagttttttgttttattgaaaaaaggcaaagtgaaaatatttttgatttatacaaatatggtaaaaaaataaagaaaattgtaaataaatttaagaaattacaaattaatgaggtatatccaatttctgtaattcctaagacacgaagtcagaaattgaaaagagttgagttaagacaaagaatacaaggtggcgagttccttgaatataatgagttgttcgaattattaaatcttttcgaagaacaaacgatagaaaatacaatagaaaattttattattttatttacagaataccaacttggcctgaaaaatattgaactaaatacaaatttttttgaactcgggttctcctcaattactattatgaaatttgttgaaatgattaatcttgcatttgatactgaaattagtgaaactgatattttcttttatgaaactcctaaattgttagcagagtatattgaagagcaaataagactattgagttaatttagtctaatagaatggagcagattatgagattagtagcattattttctggtcaaggagtcaaaaaattagatttttcttctttttttttaagtgaaaagaacttaaaagaaataattgacaaagggagttctgttttaggaataaatttgagaacagagattatttccgaagaaccaaaaactattttgaatgatccctatctttctcaaattgcagtttttttatatagtttattggagtttaaagattttgaaagaagaaaagatattgatccaatttattttgcaggacaaagtcttggtgaactaacagctttagtatgttctagaaaagttgatgttgaaacaggtttttatttagtaaaaaatcgggcaaaatttatgcaagagtgtattgctaaagatgaagggagtatgtattctctcaaaaatgtgcctatcagtcgaattgaaaggtatataaaagaaattaaattagaacaaaatatttttatttctaatattaattcgagtaaacaagtaattgtttcaggagaaaaacattgtgttgaggaatttatctcttatttagcatctaagaatgtttattatatgaaattgaatacattaggagcttttcatacaaaattgatggctcctgctgccaaaaaactatttaatctattgggagagattaattttgtacataatgataaagtgttattctctaatgttacaggttcgatatatgataaaagtaattatagagaattgctttctcgccaaatctgcgaaccagttcaatggcaaaagattattgaaaatcttcaatcttatggtctctctaactttattgaaattggaggaaatcggattatagctaatttattaaaagaatcaagaatgagttttaataaattaattccagaaaatattgatccgaatgatcggttacaagcatcgagagaagtcattttatcattttgtcattttggtattaatcaaatggttattaataaaaatagtaaccatttatatgatcaagaaattattaaaatttacaaatatttagaacaagcaaaagaaaagttttcaattgaagaggagatagcttttttaattgaactagatgaaatttataatgaagtcaaaaaagctttagttttaaaagaagttagtaatacccaattagaacgatttgatgaatgctattatacttttaaaaatgaaattaatcactatttgaggtaacaaaaatgtcagaaacaatgaaagaagatattgctattataggaatgtcaataaaagttgcacaagcagaaaacttggaagaattctgggatctattgaaagaaggaaaagaaactatatcttctttcccacaacaaagaagtaaagatgtacatatattggagaataataatatgaaatttgaagtgggttcttatttagaagatattgcttcttttgatccttatttttttaatataactcctagagaagcagaattgatgagccctattcaaagattaactttggaaaaatgtctagaagctctagatgatgcgggtattagcaaaaagactttaaatgattctaaaacaggaatttatctcggccatattggagatttagagggctataaatataaaaactgggttaacaaattttataataacgatccaatggccattccaggaaatttgaattcaattattcctagtcgaatatcgtatgtcctcaatttaaaaggtccagctgttttaattgatacagcatgttcttcttcactcgtagcgattagtgaagcgtgtaagagcatcaccaataaagaatgcgatatggctattgctgggggaattcgcatctctttttgtccagaaacaagttcagaaaaattaggaatagaatctagcaataggcagactaggccatttgattctgaagcagatggtacagtccttggtgaaggagtaggaattgtcgttttaaaacgattggcagatgcaataaaagatgaagatcacatctattcggtaataaaaggagtaaatgtaaaccaagacggctcatctgcaggaattactgcaccaaatggtaaagcacaggtggatttactgacagaattatggaaaaagtatgatattaacccacaagatattgattatattgaagcacatggaacaggaacaaagcttggagatcctatcgaaataaaagcattaactcaagcagtatctaaatttacacgtaggaaacaattttgtggtattggatcagtaaaatcaaatattggtcatttatttgaagccgcaggtgttatttcagtaattaaaacagccttaatgattgagaaacagcatttagttccttcaattaacttttcaagaccaaatagaaatatttcgtttgtcaatagcccattttatttagtaaatgaatttcaaaagtgggatgtagaaaaaaataaattgagaacagctggggttagctcttttggtttttcaggtacgaattgtcatattattctacaagaattttatcctccagaaaatttttccgatacttccaatacacatcaatctgaactgtgtttttgtttttctaatccaacaaaaaagggtttaattgcttcattagaagcgatgcaccaatttttactcttaaataaaaagattaatttagaaaaattatcgttaaatcttctgtatagaaaaagtcattataagaatcggttggtaatcatttcagaaaataaagtggaaaaacttattgagaaaattaattttacaattaataatttgattactaaaaataatgatacttttgtaaaagatgaaaaaatatttttttcatcagaagttggaaataaagctttagaagaaaaagtgttgacagatttggaaaatttggccactaacttttgtaaaggaatagagtttgaaaaaagagttccaaagttagttccaatgccttcaatcaaattttcaaaaagcaaattttggattaacgctgaaaaccgaaaaaatatgagtcttattgttgatgaaaaagacagtcgaaaaacattagagattatcatacaaaatacttttggatatacagatgttaattatcatgaaagttttttagatctaggaattgattctattggaatgatgaaaatcattaatgaagtttcggaatacttttcaaaacaattaactataagagatctttataagtataatactataaatgatttgtcggaatttttaaactcttctaatgaatcctcgaagttaaataaagaaagtatttctaagattaaaaaaaatgatttaaatgaatacactacttcccctcaacaaaaaagaatgtacattcaccaaataagatatccagaaagtacttctaataatgtgactgctctattggaaatgaaaggtaatattcagagggaaaatcttgaagaatccataagaaaagttttacagaatcatgaaatttttcaaacagtcttcatgaatcacaatgaaattaagcaaaaaattttaccaaaagaatcagtaaatttttcattagaaacgatttatttaaatgatcctaagacagaagttaccaatttaattgagccttttaagttatctgatttgcctttatttcgaatttatcacttagtatctctcttggatgcctcagaatatttatttattgattttcatcatattatttgtgatgttacttcaatggatatttttgttagagaattaattactgcttatgaaggaggagaagcagaccatttcgatacagaatataaagactatgcacagtggttagatgatcatttattaaataccatttcttataaaaatcaagaaaattattggaaaaaagaatttattgattatacctcctataataatagagaaagaataagtgaacgagctcaacaaagggaggtaatctttgaagcagagaaatatcaaaaaatcaagacattttgccagaaaaatagaataacagagcatgtatttttgaatacaatgtttgcattgacattgtattatctggaggagcaaaatgatcaaataattgggaatccggtcagtggtcgagtgtcaacaagtgttgatcatgttattggaatttttaccaatactattgcaacacgaacaagaattacaaaagaagattcaattattcacttactgaagcatactcaaagcaaaatgcttgattatttagataatcaggattatcagattaatgattttgtttcagaagtaagagataaaaatggaaacagaataaatatcagtaaaatttttgcatttcaaattttacctaaaatagtaatttctgatggtgagtttatagatataccaataaaaaatatagaatcgaattttgaacttgctttagttgcctcactaattggtgagcaattagcttttagaataaaatatttaatttctatttatgatgaaagcgatattactttgctatttgaaacttttaattcatttatcgatgagtcaataaaaaatcctgaattgaaaatttatcaattgaaagaaaagtttcaaaagcaagaaacaaaagaaatagcacaatttgatttttaatattactagtggttatattgatgatttaaaagaaagggattaaaaatggaaattttatttgagcaaaatgaaacgagaaatattgaaaaaataacaaaaaaagatcctttattgacgcagattcttttttcatcgctcataaaaatgataacttttaaaagatatggagaaataggatttgatacgggtattgtaatggacggtcagaagctggtacttttagagtcggaaaacatggatccacaacaaacccttaaacaaattattttggaagaaagggagattatactaaagaataatcaatcatttcttaggaaaaatgttacaaatgatatttttcaaaggtatatcattgattttagaaaaaagaaagctagttctattaatgatgaacatagcaagaataatgtatatttaaatttttattatcaattagacatgctgaattgtagtataactaattcagaaaatgaagagaatggtctttctgaaatgtttcatttgataaaaacagttatatctgaactccctcaaaatattaatcagaagattaaggatattgctttaatcacaaatgaagaaaaagaaagtattttaaagatatcaaggggcaaagaattatcaattgaagctccaacctttttaaagttatttcaaaaagttactgatagattaaaaaacaaagtagctatttcgtcagatgattggtatttaacttatgaacaacttaatcaggaatcagagaaactttctctttatttaagtaaactctttgagccaaaaagtattgttcccttggtgatggataatagttcagaaatgtttattgttatttttgccatattgaaaagtggttttgctttctcacccatttctttagattatcctccagaaagaatagagcatattataaaagaaactcatttaaatagtgttattgttccagaagaagctaatcttcaaatttctaaggaaataaaacaatatgtagctaaagatttgttaaataaagctccagttgaagtagatcaattttcaaatgctgtaaatgtaagaggagacgacattgcttatgttatttttacatcagggacaacaggaacacctaaaggagtaaaagtttctcatcaatcattgatgaatctcattacttggcataatgataatttctcaataacttctgaaactatagctgctaaatacgctggtgtggcttttgatgcaagtatttgggaattatttccttatttatcaattggagcaaaagtttatgttgtttcagaaaaagatcgttttgatgttaaaaaattaaatcaaaaatttattgaaaataaggttagtattgcttttttacccacagtagtctttgaaaaatttagcaaggtgcaaaatccatatttgaaaattcttttaaccggtgcagaaaagctacactatttttcagaacaagcttacgaacaatataataattacggtccaacagagtatactgttgtagccacatctttcaagttagaaaaacacatggataatataccaattggtaaacctatcgccaatacaactgctttagtaatgtcaaatgatcgtcactttctccccattggttttaaaggtgaactatatttgggaggagatagtttatcttctggttatttaaatgattctaaaaagacaaaaaatagttttattgaattagaacaaattatgggacaagttttttacaaaacaggagacttagttgcatatactgatagtggtgagttactttattatggaagaattgataatcaaattaaaattaatggatatagaatagaacttcaggatatcgaaaaaaatatattagaaataataggacaggattcagattgttctgttgttgttattccagtctctattaatggcttaatatctcttcatgcattttatgaaggagttacgggatttgactctaatcctaatcaagtcttaaaacaacttacaaataaattaccttcatatatggttcctagtactattgagtctttgtcacaatttcctttaacttctaacggaaaggttgatcgaaaatatttggaaaaaatagtactaaataaatcgacatctgttaaagaaattaataatgataatcctttattagttaaagtaatgaaaattattactgagattttaaaaggtagacaaattaatcctgatgaagattttttccaaatgggtggaaattctttaactgctattgaattagccaataaattacaagaagaactaaataaaaaagtaacaattgatgatatatttaaatttagaaatgctattaaccttgttgataatttaacaaatagggaaaacttaaaaccgctagaaactagtatccaatcttcggaggagatttcttatgaatcaagtccaagtcaaaaagcaatttttattgaacaaaagattgatgagaagtctttggcatataatatgccaattgtttacaaaattaatggagaaatagattttgaaaaattggaatctagtttggacaaagtagtaaaaaataatgaattattaagatctcacttttatttaaaagatgagcgtgttatggtaaaaacccctaaggtaaaagattattatcatgttatggaaaggaaagagcttagtgaaaaatcttttgatttaacaaaggaatttaaaaaatttgtacgcccatttaatcttgaaaaagatgttcttatcagagcgaaaataataaaaacttcgtctcaaaaatatctctttttagatagccatcatatttcttttgatgggggaagcttgaatccctttattaatgattttaaaaaggcatatgcaggagtagaacttgaaagaaaagcttcgtatagtcaatatgctttacaaacactatctcctcatttcttaaaagcaagtcattcacattttgaaaaggaatttggaacacttgtggagccactaaaattatctgattttggaactattgatcatcaaaaaaaggctggtgtgagtttcgatagtgaattttcttataagataagaaatatcgctttgaaaaataaggtaacagtatttaatctgttgttttcaattgttggatatttactcagttgtttttcaaatcaaaaagatatttgtataggtgttccagtaacaaatagaaatagaagtcagtataaaaatattattggtatgtttgttaatactctacctgttagattgaattatgaaaatttacatacagttgaggaaatgaataaatatgtaaataatcaatttatcgaagctttaaaatataaagaattttctttagaagaaattattaaaattagtagagacaaaacagaaaatgatattagccaattatttaatgtactatttgtaatgaatgaaattgaagattttaatttttctattgataatacaactttcgagaaaatgtctgctgataataaagatgtgaaatacgatttgttatttgaagttttagataatacaaaggataatactttttcaatttctttagaatatgataataaaaaatattcgaaccaattagcaaatagactattacaaagtttgcaaaagattttgatggaagtagttgacaagcaaaaaaataatttatcggatattaaaattatttctgaaatagaggaacagacactacaatcatttctaacgtggaagcaatttacaggaaaacagcaaaaactccatgaaccctttgaaaatttagtcaagcaatttcctaataagattgttgttaaagataaaaatacttcaatgactacaaccgaacttatgcagaaatcgaatattgttggtaattttttacaaagacaaggagtgaataacaataaaaaagttgctattattgttaataaatcagtaaatatgatggtaactatactaggtgttctaaaatctggtgcagcttatgttcctattgaaccgtctttaccagaggagagagtgaaatacattttagatgactcctgttgtgacttcattattagtgaggaaccattttataatggaaagattaattctgaaacaatatcaaatattctaaatgaagaaccagatatttctaaagttgaatcagacagtacctataaagatctgtgttatatcatctatacctctggttcgacaggagatcctaaaggagttatgctaacccatgaagctgttatgaatcgattgctatggatgcaaaatgcttatccaattacaaagaatgatataattttgcaaaaaacttcatttggttttgatgtatctatttgggaattatttggctggacttttgaaggtgcagtattatattttttagaaaatggagaggaaaaagatcctcaaaggattattgagttaataaatagccaaaatatttcaaaacttcattttgttccatcaatgttaaatgtatttcttgaattttgtgagagagaaaacaaagattctttaaaaagtcttagcatagttttttcgagtggagaagcactgacaaaagaacaagtaatcaagttttatagtatttttgacaacgacaagcctcaattaattaatttatatggcccaactgaaacagcaattgaagtaacttattttgattgtagtaatcttgattataaatctgaagatgttccaattggagaacctttggataatgttgaagcttatgttcttaatgataaaaaacaaaaatgtcctatcggtgttgttggggaactgtatataggaggaatacaggtagctcaaggatatattaacaaagaagatgctacaaagaaatcttttgtgagactaccgaaaatttcaaattcaagattatatgctacaggtgatttagtaaaatggacttcagaagggaagttaatattcattggtcgttctgatgatcaagttaaaattcgaggttatcgaattgaattgggtgaaattgaaaaatatttgaagaaagtaagccaaaagaactgcttggtaagccttcaaaataaactttcaaaaaataataagagcctcattgcttatattgaaagttcaacaactattgatgaaagcaagatcaaagaagaacttaagactttattacctcaatatatggttccaagtcacatttatattgtcccagaatttcctataaataaaagtggtaaagtggataggaagttacttgatagtatgtattcgtcaaaacatattgctcctaaggaaggtcttattaaatcaagtaatttaacagaagatattaaatctgtttggagtaatatattagattattccattgattctttttcagaagatgataattttttctctcttggaggagactctattaaagctattagtatggcttcgaaactcatttccaaagggtataaagtttcagttaaagaaattttgaaaaatccaacgatagctcaacttacaaaaatagtagttaagtctaatcaaatcgaagaagattcggaacttgataatagtgtcccattaactccgattagtcaatggttttggaaacaaaattttcaagtgcgaactcattggaatcaagctgtagtacttgtgagtaaagataaaataaatgatgaatttttaagaatagctatagaaaaaatcattgatgagcatactatattaaggagtcaacttgacaataattcgttatcaattgacaatcaaaaagacgctcaacgattttatgattatcaagaaattgatatttgtggatgggatgataaagcaaagatcattaatagctatgtatataatattttatctaaatcttcaaagttaataaatattgttaaattcatttgtgatgattgtgaaagaatcgtgctttcaattcatcatcttttgatagatacaatttcgtggaaaatacttatagaagatttttgtagttattatggacaacttagaaatggacagtcattaaattcaagttttaaaacaacttcatttattacttgggctaatagaataaacacgttatctgttaagttttctgaaagtaatatggaaaagaagtattgggataatattgtgcaaacgcctgtcgatttaattaatcaagatggtgttattaatccaggaagtatcaaggatagaaaacattctagaataaaattggaaaaagaaatcagctctcaactatcagatatatcagtatcaaattcccatgttacccaggagcatattcttttgacaagtgttttaatggctttaaagaaaagttattctatttcaaatattcctattttaatggaaggatatggtcgtgaagagtaccttactcaaaccactttagcgagaagtataggatggtttactaatacttatccgcttgtttttaaagtcaaggatgatgttttacaaacattaattcaagttaaagatatcattaatagggtgcctcataatggtattggctatggattactccatttggtaaatagtaatttacaagatttagatcctgaaattagttttaactttttgggagaaataagtagtgaatcaagtacacaattcatgactttggacaatattgagttagattgtttaataaataagtcaaatagtaatccatatcttattgaattttcagtatttttcttaaagggagaactattcgtagatgtttattttgacagcacgttaattagtcaagaagatgtggaaataatgaatcagaattttgtgcaaacaataaatgagctgataaattgttcagaagatatatcaacaatgcgaagtatttctgatgttacaaatgaaacatttaaatatgaaagtaacaatttacctattgttaatgataaaaatattgataaaattagaaaaacattaccaatgcaaagtaatattttgtttcttgaacaatttcaaaaaaatagaaatatttatcatgaacaatttaaagtagactttaaaggtagactgaataaaaaaatttttgataaagctgtgcaatttgtagtagatcagtacgaagctctaaggactagtttcgatttaactacatttggtgagcctgctcaaattattaaacaaaataatacaattagtatagacgcttatacatttgaaagtccaagacaggatagtgaagctgctgttaagaaattagaaaatgaattcttagatatcccatttgatactcaggaatcagatctgtttagaattactattttagaatttaaagaccaagaagtcagtttaatttttgactatcaccatataattttggacggttggtcaatgttgattgttttacgtaaaatattcacctgttatactaagcttttgaaggatgcaacctatataaatgaagaagaaaacataaatatagatgattactttgattataaagatttatttgaaactgaatcagctaaaagatattggaaaaatttcttagaaaacattggtgagaatttaaatttagaaaattactttgatagaaatcttgagggaaaaacgattgaacataatattggtgaatatagattctcaatatcaaaacaacaagataaacaaatcagacaattttgtgaaaatttaaactgtactacaaatgattttgctcatttaatttggtcaaccatattatataaatatttaaagagtcaatcacaagtatttttctatactgtttcaggtcgagatggagatattaatattgaaaatgaagttggactttttataaatactattcctcaagtgactaatatcaatgatgatagtagtatatcaagtatagtcgaaagtattcatttaaatatttctaatgcatttggctattcacaattgcctctaagtgagattttacaacaatcacaagtttctcatgatcagattaatacacttttggtttatgaaaattttcctatccataaagatgattttatagcagaattgtcagattctcaattggaatttcaaacttataaagcaactgaagctacaacgtatgacttgactcttatcttttctgaggaagaagagaagatttctattcgtatactctataatcctcataaatatagtaatcagtatatttcgattctaggaaaaaatatccaaggaattattgatgatttagtcactaaaaattatttccgtgagattactcttccagataatactttcaatgaggctttacagtcggtagaagataaactagactttaatttttaaaagaagagaggatttaaaatgaataccccaaatcatttgataacagatgtttcgactgatttagtgaaaatttcaagagatatatatggagaaaatgtagaaactgtaacatgtaaatctattaatttggatgaagacttaatgcaggaaataaaaaatatgactaaaggaagcaaacctgctgaggctgttctattctttacaatactgcaattattaacttggaaattttctagtaaaacaaatttcacgctaccttttccgtataaagtatttgattttaattcggacgacatcttattgtacatcaattgtcaaattgaggaagaaaagacaatgaaagaatttcttaatgagacaaaatatagaattttggaggcttataagaaatccctgtcagtaaaatctgtagttcaaaatgaattagatttaccaattagttttgatcttcaagaagagagtatgttgaaaagagatcaagtttctttacacttagaagagttatattttatctataattctcaaagtgagggaactgtccaaatctacttttctccacaatcttattcagaacgcttaatagaatctttgctaaatactattaaaagtatttataatacaatagttcaaaatgtagaaataaagattcaagatatattaatagaaactgttcagaataaggtattggaggttgttgaaactagctctctatatacattattaaatcaacaatttatagaaaacaaagagaaaattggattagtagattcagataaacaacttacatatcatgatattgagaaagttagtagtaatcttgcagatatgcttatttcaaaaggtgttaaagaaggggatagagttgcagtatatgctactcgatcagttgatgctgtcattatgattttaggaatatatatagcaggtgcaacctatattcctttagatatcgaagctccaacaaaaagaaaccaacaaatactagaggatgctcgaccttcaattattataacagatgagaaaaaccacttgtttggtgaagaaagttcattgaaacacatgatttattcacaaaagaattttgaaaaaattgaatttgaattgcctaaaaagagacgacgagatgtgaactcacttctttatgtcatttatacttctggaacaacaggaaaacctaagggtgttctgtttagagataaagctatggaaaatttggttaattttcaacagcaaaaatgtcagtattctctttctaaaacagtctcacaatttgcctcgttagcttttgatgtggcatcacaagaaatttggtcaacattgtgttcaggtggatgtctagttattgttaatgaagaaagcaaaaaagatacgctaaaatttttggagttttttaacagaaataagatccagactagttttttacctacttctttttttaaagttctaatgtctgatacaatcggcttgcaagaatttttgtcaaacgttgataatatcattgttgctggtgaggctctaactgtaaatgaagaaataattactaatattaaacagaataatgtacatctatataatcactatgggccatctgaaacacatgttgtctcaattgatgaagttacaaatgtagatgttacaataggaaaacctatccaaaatacccaatttcatattttagatgaaaaagaaaacgagttaccttttggagcgcctggaaatttatatatcgaaggagtacctttagctgatggttatttaaataatgaagaaaagacaactgagtcttttaagttaatttataaaagtggagttcctattcgaatgtataatacaggagatgtcgttagacagttgggaaattcaaaatatgaatatcttagacgaacagataaacagttaaaaattagggggtatagagtagaattacaggaagtggaaaatactatcttaaatattgacggagttgatttagctcaagtaattccatttttacaaaataaaaataccataatgctagcattttatagtggttcactttcagagaatgacttaaaggaaaaactatcaaaaattttaccaaattatatgattccttccatcgtgaaaaaatatactcagatgcctcttaacagaaatggaaaaatagatagtcaagaattacttctacgatatcaagactctttgcgaaatacaacaatttctagccctaccttttccgataaaatgatggaaaaaatttataatgtttggaaagcagttttaggagagcacaatataggaactgacatttcattttttgaattaggtgggaattccattaatgcaatgcttatttgtactcagctaagtagggaattttctatatcattaaatgttttagaattatttgaaaatgatacgattgaaaaattatatcaatatataaatgattctgtttctaaacaggaaaaattagcgtctatccctcatcttgaagaatctcaagtttatagactgtctcctgaacaagaacgaatgtattttttgcaacagtttgacttaaaatcaactttgtataatattccttttatttttaaaattaaaggctttttggatagtaataaattggcaattgcttttcataaattagtatcaactaatgatattttccgaacaacttatcatgttgttggaaatgaagttgttcaaactgtgaataaaacagcaaattataacattgctctagaagatttatcagatttaggtagcttagaagaggctgagaagagtttcatacgtccttttgatttatctaaagatttgttgataagaatgggtttatattctgaacaaaactcccaatatttatttattgatatgcatcatattagttcagatgggttctcaatgaatttaattatgaataaattgagtaacttttatttaggagaagatgataaacaggtatcaaggatcacttatggggattatgctgaatatactaaaacagatgaatttgaaaaaattttgcaggaacaggaagaatattggcgaaaagaatttgccaattatagtcattctaatcaattaccacactctcaacaaagctattcaggtgatatacaagaattttcttttgaagagggagatttgttaagaattgatgaatttgctaaaagacttaatataactcggtatgtctttcttttttccgttttcgcaaagttaataaatacacttgaatttcctgttgatataattgggacacctgtttcaggaagaaatttatcagagttgcaaaatgttgtgggtttatttgtgaatacggttccaattagaattccgaaagaagatgatttcaatagctacttaatggagtttaataataaaattaaaatggctcttcttaatcaaaactatccttttgatagattgattcgaatacttcgaagttctggtcagctaaattcaagtggtttatttaattttatgtttgcctatcagatttatgaatctccattaaaacttggagatattgaactagtagaaaaaaagaaaaatatattaattgaaaaatatgacttaacagccaatgtggtagattttggaaataatataaaaattcaaatcagttttaataccgataagtacagccatgaggacatcaaacagttgttacaaaaatatgttgagtttataaataacattttagatggggaggggatatgatggagcagcaaaagaaatttaaaaataatcaatttgattatgataattatctcactataattaatgagttcgaaaaacaggtagaacgatttccagataagattgcaattattcataatgatacaagaataacttataaggagcttaatatactagcaaataaagttggaaatattttaatttcttctggggttgataatggtgataaagtcgcaattgacatgaaacgaggaatttcttatattgctgcaattttgggaattttaaaaataggagctatctatgtcccactagattttgattttcctcaatcaagaaaagaatatatcctgaacgattgccggtcgaaaattattatcacagaatcagatattgaatataaaaattataaaaaagtaaattggaaccaaattatagaaggatcttcctcaaaggatttagtaacagatcattatgtcaaagaaagtttagatgaaattgtttatattatgtatacttctgggactacgggttttcctaagggagtgcaggttggcggaagaggaattattcgtttgataaaggacaataaaagcttaacaatgaaaaatacagaagttatgctacatggttcttctttagcatttgatgcgtcaacattagaaatatatgcagctcttttaaatggtgcatgcctatctatcattgataaggaggatttaattgatagtcaaacattaaaagaaaagttgaaaaatgatcatgtcaatcgagccttttttacaacccctttatttaattcattgtgtgagcaagatccaagtgtattcaatgagcttgaacaagtaattataggtggagatagagcatctaataaacacctaaaaatagtaatgaagaatagcaagaaaactcaattttataatggatacggaccaacagaaaacactgtttttacgaccatgcataatattcaatactcagagttagaaggtgatattccgatcggtaaagcaattaatgatactggaattcttatcgttaatgaaaattttgaagaagtaaaaaaaggggaagttggagaattagttgtaacaggtggaggtcttgctattggttatctaaatcaaaaagatgcttctcaaggttcctttatttctcttccaaatctagggatcaaacgtgcttataaaacaggagattatgttagagaaaataatgatggggatctcatttttattggccgcagagatagtcaaattaagtatcgaggttttcgaatagaacttagagaaattgaaagtattgcaaaaaagattgatcatattagagaagctatttgtctcctaattggtgaaaaatctaattctaaattagttctttttgctgagtctaattcttctgtgtcagaagcttctattattgaaacacttcatgttgagcttccagaatatatggtgcccaatgatcttattttgctagataatatgccattaaaacttaatgggaaagttgattctgacaagcttaaacaaatctatttggaaaaaatacaaagtcaggttgaaaaacctagcgaaagtaacacagagagatttttcatagaaattttggaagatgtgttaaaaaagccaaaccttaatttagagatgaatttttttgaaattggtggacattctttaaatgcaacaattatatcaacaagactatcagaagcatttcataaaaaaatttctgtcagagatgttatgttaaatccaaatttgaaagatttgtttcatttgactaaggtgacagaagatgacgctggctctaatttagaagtgctatcaaaagctgataattatgattgttctcctactcagtctagactttttctgttaaacaagagccgaagtgacacatcttataatattccatatttcattaaggtaagtagcaatattgatatggaacaactaaaaaaggctatttggaaagaactaaaagaaaatgaaattttaagaacaatttatacatttaacaattccaaaattgtccaaaaagttcttccgtttgagaaaaaactacttaatatttctgtagaatatgaaccaataattgattttgagtatttgcaaaagtatttgattcaaccatttgatttggaaaaatcgattccctttagggcttctatcataaaatccaatagtgatatcatcctttttctagacattcatcatattgccatagatggtttttcattaaatcaactcttaaaaaatattgaaaaaaactattttgaaattaaatttacgcgtcctaaatttacttataaagattactctaattggataaataaacagattagtaatggtaagtatatgcaaaagaagcagtattggcaagaacagcttaaaggttatcaggagaatatatttttaggaattgaaaaaactataaaacccaattctaaacgaacgatttactataatagagaaatatcttcacaattatatgaacaattgagagattatatagttacaaataatattagtctaaatatactttttatgactgcactttacattcttatagctaaatattcctcaattaatgatatagttattggttcccctgtttcaggaaaagtattagcggatttggaagaaatgattggttcttttattaatagcttaccaattagatataaagtagatccatcaaaaactatcttggaaacgattgaggatgtaaaaaagcaagtgatggatgcattagaaaatcaagaatatccgattgattcgatagttagtgataagaacaaagaaaatacggaaattgcttctttgtttgatattatgtttgttatgcagaccaatttcaagcaaggtgaacaagaaaaatcaaatcagatatttttagactatcaagagattccgattgattctaaaatgaatttaattgttgaaggaattgattttggaaatacggtaaagtttcaaataacttaccctgttgaactgtatgatgatgacagtattattcagcttatggattcatttttacaagttattgagtcaattattcaaaatgatagaaggtatgtaaaggaaatagaaattatttctcaagatcaaaaagattttattgatttaaattataataaaacagctaaggattttaaatttgataatcagtgtttgaaacaattgatcgaaagaaatgtagcgaagatgcctaataaaattgctattgcctgtgatgaagaaaatattagttttgaacaattaaatatgagatctaattttatggccaataaattaaaagatttaggcttacaagtgggcgatgtagttggtgtcatgaaagatagaaatattgaggcaataatcattatactagctttaattaaactaggagtaacatatgttcccttggattcgggaacgccaattgaaagagttaaaaagatttttgttaaatctggaatgaaatttgtaataactgatttggtacctttgcagaaagatatactaattattgatactaatgctccagactttcaaggtttgtctaaacaaaatccaaaaacagagatcaatttagatcagatgctatatatcatatttacttcgggaagtactggtgagcccaaaggagtagctatttcaaataaacagtgtattaatactattttggatattaatcataagtttacactatctccaaaagataatattctattgatttcatcttttgcatttgatctttcagtgtatgacatatttggtgcattagtttctggggcaactttaactattgctagtcaaaataaagacacaaattatttgaaaaaagtcgttcaaaataacccgattacagtttggaattccgtaccagcgtatatggaattaatttgtaatgtattagcagaccagaagccaatattaagtattagaaatattattctgagtggtgattggataccattagaattgcctttgaaaataaaaaaaatctttcctaatgctaatctttttagtgcaggaggtgctactgaaggatcaatatggtcaatttattacccaattgttaaagttgaaccagaatggaaatcaataccttatggaatgcctttggctaatcaacagatgtatattctgaataatatgggaaatgaacttcctattggagttatgggaaatatatatattggaggagtaggagttgcaatgggctacattaatgatattgagaaaactaatgatagtttcattaatcatcctaaattaggcagaatttataagacaggtgatttgggacgcttaacttcccaaggatacatggaattttgtggaagaaaagatattcaagtaaaagttaacggaaatagaatagagttaggagaaattcaagcaattcttcaatcttttgagaccattcaaaatgcgatagtaactgtaggacagaatgattatcaaaaacaattgctggcatattataaatctgataatgaaattgaaaaagatgtactgaatcagtttatgaaacaatatttaccaaattatatgattcctagccattatatttatatgtcagagttcccattaacttcaaatggtaaaattgataaaaaacaattaccggatcctaaaaaaatagaatctattaaagaggtaaaagatgtaaaacctaaaaatcagttagaagagaccgttttgacaatttgggagaatgtattggaacatcaagttctttctgtaacagacagtttcttctcagaaggaggcaattcattaatggccacggtcattataggtcagataaaggatcaatgtaatgttgatttatctctagaggaattctatgaaaatgactcaatagaggctttaggaaatttaataatagataagttacttttttaaaagtactaactatcattaaaacctttgaatgaagaaagggattatatacgatatgactacaagtaaacctcaaaataaaatcgaagaaacgcttttgatgatttgggataaagtgttagatcacaaaattgattctacacagacaaacttcttttcagaaggaggcaattcattaatagcaactttagttattagtgaaataaaaaatacttatcatgttgatgtatcttttgaagatcttttaaaaaatgactcaatagaaaaacttgcgaattttattgttaaccaattatggttatcgaaacaagtaattaacaataaaactttagaaaaagaaagtaaatctatagatactttagaagaagaaagtgggcctgtggattcattgaaagcttctcctcaacaaagtagaatggtattaaatcagctatttaatccttcttccacagcttttaatattccagttattttccaattaactgatcaatttgataaaaatgaatttgaagattgcttaaaagaaataataaagaaacatcaaactttaaatatcaattttagtattaatgaagacggcatatttcaaaaagtgcaaaatcaaattattgatgttagagagataaaaatagcagcatttgatgagactcttagtagtattataagtccttttgaaattggtaaggattccttaatcagattaatctatgccgatgccccttcagaaaaatacttgattcttgattttcatcacagtattatagatggttattcaattgttttgttacacaatgaactttttaaaaaactttctgatgaaaagatctattttgaaaatgtggactattttgattattgtatttggatggaaaaatatattcactcaccgagctataaaaaacaagaaaaattttggttgaaaatttttgagaattatcaattaattcaacatttaaagcaaaaatcaaattctacttttgagggagattccattgaattctcgttctcaaaggatttaaataaaaagattcgtgaaacaactaaagaatgggggataagtatatattcatttttgttatctatgtacgctcaacttatacataaagaacataatttatacgattttatcattggaactccagtttctggtagaacaaacccgaggtttataaaaactattgggatgtttataaatactttaccaattagagtaaagattaatgattcagaaaattacgagcaatatagccaacgaatgaattctaatataagaaaaatgttagaaaatcaagactatcaatttgatcatttggtagagcaattaaaaaaaatcaatcctcaactacctcgtttggaatttgaaacaatgttcaattatcaaaattatagtcgtaattggaaatctctagagaaatttggcttaaatcatattacagtccgacaaaattcagaaaaattcaatttttcaatgacacttgaagaacgggaagacgagatattaggatgctttagttttaatgttgaagttttaacaaggaatgaagcaaaatggtatgttgagcagtttataaatatttgtgaagaggctgtagttcagaaagatattaatactgtcacaacattacaaaatattgaagatactaatatttattataaaataatggaaaaccttagtgactttaatggaaaaactgctttagtctcttataaaagtaaggtagagtatgcagaactagatcaatttgtggataattatgttcaaagattcaaacaagaaggaataagaaaatctgatagaattgctattatgatggatcgttccattgaaaatgttttagttatattagcgatattaaaaattggtgcgtgttatatacctatagattcaaaattccctgagtcaaggaaaaaatttatactgaaggatgctaactgtaaatatattgttaacaataaacaggtgattaaaaatgttgagtatgaagcaaaagaattagatagttctgagttaaatttagcttatattatttatacttctggttctacaggacaacctaagggagtaaagataacgcaaagtaatctttatagctttttaaaagctatttctaacagattcagtcagtataattattcttctattttgtgtgtgacatcaatttcctttgatatatttattcttgaaacccttttcccaatatttatggggaaaacatgtgtttttgcaagcgatgaagaaattgaagatatatcaaagttgactcagttaataagaatataccaagttgatacaattcaaagtacaccatccagatggggaatttttacagaagatgagcagcttatgacacttttgaaagagcgactaaaacttgttttagttgggggtgaaaagctgacaaaaaatattgctgagaaattactttcgattggtggaaagcttattaatttatatggaccaacggaagcaacggtttgggcctttgctagtgaggtaacggatcctaatcaaatttatctaggtgagcctttaaataatacaacagcttatattttagacgagaatggaaaagaaagtccaaaaggtgagttgtgtttacaaggttcaggagtttcacctggctaccaaaatagaccagaactgacagaaaaaagttttgtaaaatctttaaaacatggcaacaatatcttatatcatacgggagatattgtagaatatactaatgatcaagattatctgtttattggaagaaaagatgatcaagttaaggtaaatggatatagggttgaactaggggaaatagattcaataatatcaaaaatgtcaaaaataaaaagagcaaaaactatttatcaggaagaaacagggaatctaatagctttttgtgagtcaaaagagcattgtagtgatattgaaactagaaaagaattatctaaaattttgcccaaatatatgcttcctaattccattatctttctttctgaaatgccgttgatgatcaatggaaaaatagatacttccaaattaaaaaataaatatcttcaaatcgctaaaaaatcacttgttctgtctgaaaatgtcgaagaattatcggcgacacaacagcacttaattaaaatatttaaatcagttactggctatgctttggatcgtgacgaaaatttttttgaagtcggaatatcttcattgaatattttaagagtgattcagcatttgaaaaagacttattctgttgattattctaatcttgtagattatcctactatcagtagcttgtcttcctatttagataatttgagtgaaaaaaaattggttcgaaaagttaattcggataaagatagaacgcaaatttcgaaaataaatgagcgagaggtattaaatgttggaagaaaaggcatactgctaacaggttcgacaggatttttaggttgtcatcttttgaaggaacttctcaaacagaaaagaccgattcatttattgattagaggaaaaaatgtagaagatatttataaaagattagcagagaaattctattattacttctcagaggatttagcaatttatagttctcaactccatttttactgtggggatttggaaaaagtttactgtggacttgaagaatctgagtttaaaaagctatgtacccaagttagtgatgttatcaatagtgcagcaagtgttaaacactttgggaaatatgaagatttttataaaagtaatgtcatttctgttaaaaatctcattacattttgtaaagaatcacaatcagctctatttcatatatcaactatatctttagcaaatatctgtgatttaaaggcaaatcaaagtttttctgaagaaattattttgactaatgcttcaacatcaaatgtttatttgcaaacaaaatatgaagcagaaaaaaccatttttgaagcaatttcagaagggttaaaagctaacatattaagagttggtaatattgttggaagcagtaaaactggaatttttcaaatgaatatagaagagaatgccttttatcagattttaagatcattttttaaattaaaaatgatacctgatagtaatgaaaaatcacttgaattcactttcgtagacgaatgtgctttagcaataagtgaaataattaataataaacatttaacaggtgtttatcatatatttaatcagaataaaatttcatttaatgaattgtttgattttataaaaactcaatatccatatttaaaaaagatgactttttcaaaaattgaagagacacaaggactaaaggggacagatgctgaagagtattttgatattataaaaattcattcaagtactgctaataaaaatgtcgcaaagattgataatatttttacaaatcagttgcttgataaatacaatttttgttggagccgtgttgataaaaagaccatattgctattactagaatattgtaaggaaattaattttatttaaatgttttaaaaaagaaaaggtgatatcgtgaaaaaaaataattattataaactagtttcagcaaaatttttatctattattggaacctatatgcaaagcacagctttttcactttatattattgatacgctccatgatagcctcatttttgctactatattaatgagtgccttacttcccaaaataattcttggtccacttggtggcgtttttgttgattggtttgatagaaaaaaatttctagttgtcattgatcttataagtggtgttcttctacttatatcagcattggtatatggaaataatttatctttaccaataatttattttatttgtattagtttgggaataatgaattccgttgatgagcctttggtagttgctttaataccatcattggtagaaaaggaaaaacttgttactgctaattctattaatatgtttagtacagcgctgggtaacattattggtccaattttaggagcagtagtgtactcaagttttggaattgatacaattttatatattaatgcttctagttttattattggggctatcctggaatttatgattaatatagaaaataaaaagaagattagtcaatctaaaaccatctttaattttcttgaagactttaaagcaggattgatatatattgtacggaatagaattattttagtcattgttgtatctatattttttcaaaatttcttttttaacggtgcaacaactgtaggagtcccgtttttggcaaaacagatattgaaagtaagtaatgctgagtttgctattttagaaactacattgattgtaggttctatatttggtcttctggtagcatcaaatcttattaaagataagcctctggctagcctcttccccaaattactttttgtaatttcagtttgctttttgatgataggtttaatttgtattttccttttaaaaaagcaactaatggcttatgtgttcattgctattatttatatttgtttaggtatgttgtcaatgaacgttaatgttttgtttcaaacagaaatgcaaaaaattgttgatgagtcaatgtttggtcgagtatcgtcattaatattatctcttattatgtcttctattcctcttggacaactggtatatggttacttatttaaggttgttagtccaagtattccatttttagtaacatttatagcaatttgttgtgtttcaacattatttagtttatctttaagaaattcagaattataattattaaagaaaaagaaagaggtataaaatgattactagtaaagataacttaactttaatttttgtgcatgcttgtggagttggaaactggatgtggtataaacaaaaggattatttttcaaatttttcttgtatgtttatagaacttccagaacatggagataattataatattcaaccatttagtgttaaaagtgctattaaaatgattgataaaactgtcagaagtgcttctggagaagttgttttaatcggtcatgaaatgggagcaagacttattttaaactatttagcagaatatacaaatgataaagttaaaaaaattgttttgtctagtactatgataaaaactgttaaagaaggcttatttcataaaattttacctgctaaaataattgaaaaagaattcgaaaaaaagaataaaaatttgcaaaatatagactttataaaaaaaactcttgattattatggagttgaagaagaatataaagattattatttaaatgatatgaaaagatataaacctaggcaactgataaaaattattcaagaaggcttgctaaaaaaacttcctttaaatttatttattgacaatgatatcccagctttaattttagttggtgagaaggagacaaatgctaacagattgtccgcaaagttattaagtgagtatttttcaaatagtgagttaattatagttgataattcgacagataatcatattagaacgaattctatggtatttaatgatagagttaaaaattttattttaacctgaaatataaaatgtaaaatgaggagttgaaatgaagacagtttatttgctaaatggacaaggatctcaatattatcatatgggacaatctttttataaaaaaaaccttttctttcgaaatacattgaataatttaaataacaaagtcaagaaattgtttaatatctctgttttagaaaatattatggatgattcaaaaaaaataaatactccttttgaggatttaactttatcaaacttaggtatcttttttattcaatatggactttttaaagttttggaaaaagaagacattttaccagatattttagtaggagttagcttcggagaatgctcttgtgcaatcatttctaaaaaaatttcacttgaagatggtttaaaaaccattgtgactcaatcagaatttcttaaaaatgcaacaaatagtggttatttaataaatattaataaggatcctaaacaaagtattttgaaaattagtaattcagaatttgcgggaaagttttcgctagggaattatctagtatctattgagaagtttgaaaaagctcaaaaaatagtggattatgcttcgtttgtgaataagacagcgataattttaccagtcaaaattccatttcattcaaggttgatagatgatctaaatgaggagtatctaaaaatagttaaacaaaactgtattcagtattcaagttctgaatatgaaatttattcgtcagggagattgaaaactgatagtaatttttctgatcaatcgttttgggatatgattcgagatccaataaattttgaagaagttattagtattttagagagaaacagttgtcggtatattgagttaggtgctacaaatacacttgcaaattcagttaggaacataatttcagatgtttcgacttcggaagtttatgaactgatgggggcatttattaatactcaaagagtaatcaaaaatttatcaaaagaataggatatggagacaatgaaaaataaacaaactttggaaagtattttaaggataaattatccaattttacaaggagcaatggctaatatttcagattcttcattagtttcagctgttagtgaagctggagggttgggaattcttgcctccggtaatatggaacctgaggaagttagagaagaaattcgtaaaacaaaatcaaagactagttatccatttggagttaacattattatttctagtaaattttgtgatcagatcattgatgttcttcatgaagagaaggttgatattgttattacaggaaatggggatccgggtaagttttttccaaaattcaatgcatggaatatgaaagttattcctgtagtttcttcatatatgatggcaaaacgtatggaaaagttaggagcaatagccgttattgctgagggaatggaagcgggtggacatattggttctatcacaacaatgtgtttattacctaacatcactaaagatatttctatacctgtaatagcagcaggtggaattgctagtggatatagtatgatggctgcttttaacctaggtgcacagggagtacaaataggaacacgttttttattagcaaaagaatgtaacatccatactaattataaaaaaagagtgattgattctaatgactttgattctgttgttataaaaaatatgataaataaacctattcgaagtcttcgaaacaaattaactaatttaattggaaggttggaattagaatatttaaaaaatagaagtacatctattgaagacattgatttaaaaactataaatgcgctttcaaatgccgttaaaaatggagatgttcaaaatggtttagttatggcaggtcagatatcagcagtgttaactaaagaggagacttgcaaagaaatcatgtgctctatactaaatgaatggaatagctgtacagaaaagacctacagtaaatatgatttaccacaggttagcaatacttaaaaataaactggtaataggtaaaataaaatgaatattttaatgattaatagtaaaaggttgatgaaatatgatctgttttcgagattattaactttaattgaggaaagatatcaaaaaaaaattttacgctatcatttttgggaagataggcaacgttctcttttagggcaccttttatcacgatatgcaattatgcaacaatttcatttaaataatgataagattaaacttgtcgaaaatccttatggaaaacctcatataaaaggatatagggcaattcattataatatttctcactcaggtgattgggttgtatgtgccattagccaatcagttattggaatagatattcaaaaatttgaaggtatgaaatttggaattgttgaacattgtttttcaaaggatgagaggaagtatttattttctttaggaaaagcacaacaattaatatctttttatgatatgtggactttaaaagaagcttatatcaaagctataggtaagggattatttcagcaattaagtgaattttctgttcttaaagatggaaaggattttagattatttacaaaagaacctttgaataaaaaattctttttcaaaaagtatagtatagagaaaggatacagcctttctgtttgttcacaagaaaataatttttgtgctaaattagaagaattatttattgatgatttaataaaaagattcaatttatactgatagataattttcatagttatttgttaaaagtgatataataagaattatccgtatcaaatatttatgcaatacagaacgcaatcatcctcatagaaatcttgtctaattttggaggttagtgcaatgctgtttcttttttgtatatctaacccgtggtgctagttaatatcaaaatacaataaaaagcccaaatagactatactgtaagtgtctgaacagacaggaggtagtctaaatgagccacttacagtatactgctaaatctcatcatttacaatggaatatgaagcaattatcaaaaatttgtcatcaactttatcgtgatgactgccctgactcactgacacatcgtcatcatgtcagcctatccaaagtttcggacgaatttctgttagttttattgttattgcaagctgaactaggaatcaaatcacaacgacacttttatagaatctgccaactgtttccttgtggccgaatccttgaaagaagtcgctttaatcgtcggtcaagacaattaatttggactctataatatctgtagtgggtaaatccctttcggatattatagggcttttttagtgtatgaaaaaagtcccatatgatttataatgaaaagcgaccaaacttacattagaaagactcatgtggaacatcttaagaataccacagatttaatcggattgaaagacaaaaatatcaaaatcctgtttgtctgacaacttcaaacccacatcgaaataaaagctaagctggactatcaagctcctgcctgcccacattgtcaggcaaatatgattttcagaaagcttcatccattcctatccttgacagtcaaagaatgcctactgtccttaagctcaagaaacgacgttttcagtgcaaggcttgtcgtagagtctctgtgtccgagacacctctcgttcagaaaaattgtcagatttccaaggctatctgggctaaaatcacgcaattacacaccgaaaagttgaccaactcggctatcgctaaaagattgcacatttctgtttctgtcgttcaatgacaattagaacaattcacctttaaggaaagttacgataaattgcatcaaatattatcctgggatgaattctcacgaaataaggtcaaattggccttcattgcacaagattttgagacgagaaagattgtcactgtccttgagaacaacaagcaatcaaccattaaaaactacttctacaactaccctagaatggttcgagaacgggttaaagtcgtgactgtggacatgtctgctagctacattcccatcatcaaacaattgtttccaaatgctcagattgttttggaccggtttcacattatccaacatctgagtcgcgctatgatgagtactcgggtagccatcatgaagagtttgttttggcatcaagtctctaccctatcgagctatgaaaaatcattggcgtattctccacaaggatagtcggaaactttctgataaagccttctattcacgaactttcaggcaaaccttaacaccccgtgagattgtcgacaagacgctggctttctctgatgaacttcgctattatgacaatctttatcagctcctgcttttccattttcaagaaaagcgagcaactcaattttttgaactgattgaagaccatttgaacctagtcaatcatcgctttttaacagtcttcaaaacctttctgaaatacaaagcttacatcatcaatgcccttgaatgtccttattccaatgccaagttggaagctaccaacaagctcatcaaagatatcaagcgccaagcttttggctttcgaaacttcaaaaactttaaaactaaaattctcatcgctttgaacatcacaaaagagagaaccaatctgattctctctcgtgcttagttataagtcacccactacagttgacaatgagccttaatttggctggtgcaactgattcgccaagctatgaacaagcaactattacctgatactatcgtcatcatggacagttttcctttagttctttgttagtctgttcgcaactatagagcaagaatttttgaagggttagcagacattggttacaatgcgactaagcacttatggttctacagtttcaaagttcacatgctcgttaccttatctagctccattctgaacgatgttgttacgtcagcatctgttcctgatatcaaagtggtagatgacttattggaaggttgccagcaatctgtgattttagcagacttaggctatctcagtcaggagctcaaagatagcttggaacgaagagggtatcacttatggacaccactgcgtcagaacatggaggggactagccagtataacaattggagattgctagctatgagacgaactgttgaaacacgtttttctgaattatgtacttctgtttgatatggaacaaaccttcgccagaagcctaacgggactgcaagttaggattgaacaaatcctattgacttataatctgggctattttgagtttaactagcaccacgggtatatctaattaataaagatgcttaaaacacttaatttataacctttttaacagtttccttaggtggcaggggtaacgaatagctgttgattgagttttgtactgacctagtatgaggtatattattgatttctcatactaagtgtcgtagcaaatatcttagtttctttttaagcttcaaactgaaggtcttaaatattgtgcctctgagacctaatattttgtagcagaacctgtttttttaattaaggctggaacaaaagtgccccagcctttttattgtacagggattttaatttaacacagtggttgattggaatttttgcatcttggcttttaaactcaaacttttaacagaccactgaactattaaagtatcctttgcactgcaagtgacagctccaattgtttgggaaacagttggagcttatctaagttcatgaaggttagtttctgtcaatacctaattaactttgcggaaggtgaactgacaaaatcgaaatcgtcatttcattacaattacctaactaaaaagtttttttgtagatacagattttaacaataacaaatcagtgtatttaagctgttggaaaagtttgagagaataactgcctcttgcagtctttgctgtttttctttaaaataaaattatgatgattaaggaagcaatcaaacaattagctcaagatattgggatttcaaaaataggatttacaacagctgatgatttcgattatttagaaaaatcattacgtgcttctgttgaagaagggcgttcttcaggttttgaacataaaaatattgaagagcgtatcaagcccagactttctttagctagtgctaaaaccattatttcaatagcaattgcttatccccataaattgcctgttaaaccacctaaaactcagtataaacgcggcaaaattacgccaaattcttggggcttggactatcattatgttttggaggaaaaattacagcgtttggcgcagggtattgaaagtttatgtcaagatttccctttagagcataaaattatggtagatacgggtgctttggttgatacagccgttgcccagcgctctggaataggtttcattggcaagaatggcttagtcatctcaaaagagtttggctcttacatgtacttaggtgaacttattacgaatttagaaattgagcctgacagtcctgttgattatgattgcggtgattgtcacagatgcttagatgcttgtccgacttcctgtcttcttggtgacggcagtatgaatgctaagcgctgtctttcctttcaaacgcaggataagggcatgatgaacttagaatttcgtaaaaaaatcaaaactgttatttatggctgcgatatttgccaaatttgctgtccttacaataaaggaattcataatcctttggccagtgaaatcgatcctgaacttgcagagccggaactgctgccgtttttagaactgtctaatagtcaatttaagaaaaaatttggtatgattgctggttcttggcggggaaaaaatactttacagcgcaatgccattattgccctagctaatggtcatgataaaagtgctcttgtaaaacttatggaaatcattgacaagaataacaatcccattcatactgcaacagctatctgggctttgggtgaaattgttaaaaagccaactcaagaattgtatgatttcattttaagcattcattcagataatgacgctattataaaagagcgaactgctctgcttaatagatggcaattttaaaagaactatgatagaataaaaaagatgctggaaatgaggtatgtataatatggatatggcagaaattcgccaaaaaatagtagaaaataaagaaaagttgactagctttcggaggtctctttgacttagatcgcttagaagaagagatcgctcttttagaaaatcaaatgacagaaccagacttctgggatgacaatattgctgcccaaaagacatcacaagagttaaacgaacttaagctcaaatatgaaaccttcaacagcatgcaggaactgtcggatgagacagaattgttgcaagaaatgttagaagaagatgatagtttgcaaggcgaacttgaagaagaccttgtcaagcttgataagattatgaccagttatgagatgacgcttcttttatcagaaccctatgatgctaacaatgctattttggagatccatccgggttctggcggtacagaagcccaagactggggtgatatgctgctgagaatgtatacccgctttgggaatgccaaggggttcaaagtagacgttttggattatcaagctggtgatgaggctggtattaaatcagtcgctttatcttttgaaggccaaaatgcttatggtcttttaaaatcagaaatgggtgttcaccgtttggtcagaatctcaccatttgattcagccaaacgtcgccacacttcctttgcctctgttgaggtcatgccagagcttgatgataccatagaagtagatattagagatgaagatatcaagatggatactttccgttctggtggtgctggcggacaaaatgtgaataaagtgtcaactggagttcgcttaacccatattcctagcggcattgttgttgcttcgacggtagatcgtacccaatatggaaatcgcgatcgagccatgaaaatgcttcaggctaaactttatcaaatggagcaggaaaaaaaggctcaagaagtggatgctctcaaaggtgacaaaaaggaaatcacttggggcagtcaaattcgttcttatgttttcaccccttatactatggtgaaagatcatcggacaaactatgaagtttctcaggtagatagggtcatggatggtgaactagatggttttattgacgcctttctcaaatggcgtatggaataaaaacgagaggaaataaaaattatggcattaattcaaatgaagggtgttacgaaaaaatataaccgcggtgcaactgctctgcgaaatataacaatttcagttaatcaaggtgaatttgtttatttagttggtccatcaggtgctggaaagtcaacctttattagattgctttatcgtgaagaaagaacgactaaaggggctcttaaagttgggaaatttaatttagctaagatgaagaaaagagaaattcccatcttgcgtcgtagtattggggttgtcttccaagattataaactcttgcctaataaaacggtctttgaaaatattgcttttgccatggaagttatcggtgaaaaaccgcgtgttattaaaaagcgtgtaacagaagttcttgatttagtcgggctgaaacacaaaatgcgctcttttccagatcaattatcaggtggtgaacagcaacgggtggcaatcgcacgtgccattgtcaataatccgcaggttttgattgccgatgaacctacaggtaacttggatcctgaaatttcatgggaaattatgcagttgcttgaacgtattaatcttcaagggacgactgttttgatggcaactcataatcgccaaattgtagatacacttcgtcatcgtgttgttgccattgaagatggtcgtattgttcgtgatgaagaggaaggagagtatggatataatgattagaagatttttccgtcatttatggcaatccattaaaaatttaaaacgtaatggctggatgactgttgcagcggttagctctgtaaccattaccttgatcttggtcggtatctttgcagcctttctcttaaatactgaaaagttagcatctggtattgaaaaaaatgttcagattaatacttatttgcaagttgattctaaggataatgttaaatcttatgtagattcaaatgatgccaataaaacagttaacaatcctgattatcataaggtatatgatcaaattaaaaaaattgaacacgttaaatcaattaccttttcaagtaaggatgaacaattagagaaacttaagaaaaccatgggagacgattggaacttgtttgatggggattccaatcctttatatgatgtatacattgtgcagacaacttcacctagtgaagtcaaaacagtagctaaagctattgggaaaatttctggtgttgattcagttgcttatggcggcacagatactgatcgtatttttggtttggctaactttgttcggacatggggacttgcaggaactggcctcctagttttggttgctatctttttgatttccaatacgattcgtataactattttgtcacgtcgcaacgaaattcaaatcatgcgtttagttggtgccaaaaatggctatatcagaacgccattcttctttgaaggagcttgggttggtcttattggagcgattattccagcggttgttgtaggttacttatatatctttgcatttgagcaattcaatccaaatcttgctgctcaaaatctctctctttatgaaccaagtcctttcatcttttaccttattggtgccatgtttatcgttggtattttgattggagctttaggctcaattttatcaatgagacgattcttgaagatataaaaaaagcccttgattgggcttttttgcttatcgggatgatagaatggattctaaatcatccgttttttgatatttactaaataaagcaaatcaagtagcttgattgaagatttctcatttatttactggttaaagaaagggttgaagttcttttcatgcccaattgttgtatcaaagccatgccctgggaaaactttaaaatgatttggcaggctaaaaaggttttctttgatactgttaatgagctcatcaaaatttccagtaggcaaatctgtacgcccaatactttctttaaagagagcatctcccgaaaaaactatttcttcatctataaaaataaaggaaacacttccccaagaatgtccgggtgttggaacaactttgaaatgaaagccagctatatggtaatccatattatcattaaagaaaaagtcagcaggagcagcaaccacatcttccatatcactgtgacgactcaatcctgataaattgtcaatagggctgcccagccaagaagcctctttttcagaaacatagactggcggataattaaaatgctgccgtaccaaatcaagactcataatgtggtcgtaatgggtatgggtcagtaaaatagcagcaataggtttattgatttcctttaattgagcaaagatatcatcaccattgcttccagggtctatcaagaggactgcctcttcattaacaaggtaataggtgttttcacgagcagcatcgtttaaagttcttaagattttcatatctttagtttaacaaaaatgctttctttttgaaatcaaaaagaaaggaaagccgtcattttttaattgaccttattttttgttgagtttatactattattattcgagaatggaggtttttaatatgacaaaagttgcaattgttactggtgcaggtcagggaattggccttgctattgctaaacgtcttcatgccgatggttttaaaattggcatgctggattacaatgctcaagcagttcaagaagctgctgctagtatttccaaggaagaagccctagcagtaacagtagatgtttcaaaacgtgaggctgtttttgatgcttttgatcaaattgttgaaaaatttggagatttgtcagttgtggtcaacaatgcaggccttggaccaacgactccagttgaaacaattactgaagaacaatttaaacaggtctacggtgttaatgtcggaggtgtcatttggggaacgcaagctgcttataagcattttaaagctttgggacatggcggaaagattatcaatgccagttcacaagctggggttgtcggaaatccagagttgacactctattcaggaactaaatttgctgtacgcggaatcactcaggtaacagcgcgtgacttagctaaagatggcattacagttaatgcttttgcgcctggtattgttaaaacaccgatgatgtatgatattgctcataaggtcggtcaaaatgctggaaaagatgatgagtggggcatgcaacaatttgccaaagacatcactttgcagcgtttatcaaaaccagaagatgttgccaatgtcgtttctttcttggctagccctgattcagattatgttactggtcaaactatattggttgatggtggcatgcagtttcattaaaatagagaaaaaggccttagggtctttttttgttttagtaatttttaaaaagagtaaataatcagaaaattttgtcatttccatagaattatcctaaaaattgtgctagactaaagaagtagaaactataagaggatttatttatggatagaaaaatgaattttgtaatgatttccccccattttccagcaaattttgagactttcgcccaccgtttgtatgaaaatggtatcaatacactagggattgcggatgccccttatgagcaattaagtcagggtttacgtgatcatctaacggagtattaccgtgttgataatatggaagattatgatcaggtttaccgtgctgttgcttattttgctcataagtatggcagaattgatcgtattgaatcccataatgaatattggttggaattagatgcccatttgcggacggattttaatgtttttggttataaaaatgaagatatgctttctatcaaaacgaaagcacgtatgaaagaaattttccgcaagacaggaattaaagttgctcgtggccgcgtctttactagcactgaagatgctcgtgctttgactaaggaactcggttttccggttatcattaaacccaactctggcgttggtgcttcggatacatacaaaatcaagtcagctgaagaattagaagacttttttggctatcaaaatcccacagttgactatatcatggaagaattcattgatggtgatatcgttactttcgatggcttgacagatcacgaaggcaatattgtcttttattctagtttggaatattctgaagcggttttggatacggtagaaaaagataacgatatgttctattatgtccctcgcgacatctcaccagagctgattaaactaggtgagcaatgtgttgaagccttcaatgttaaagaacgtttcttccattttgaattcttccgtattaaaaagactaaagatttaatggcgcttgaagttaactgccgtccgccaggtggcctgaccattgatatgtgggactatgccaatgattttgatgtttttaatgagtatgcccatattgttaaagacaatcgttttgaagctcatatcactcgtccttataacgttgtttatatagctcgtaaggctaataaacattatgcgcatagtatagaggatattgaaactaaatttggtcatcatattattgaaattgagtctgttccgggtatttttgctaaaattatgggagaagttggtattttagctcgaacagaaaccatgaatgaaatgcgtgacattatctgttttgctcatgctaaaatctaatctttgagaattaaataatgatattgaaaggataaatgcggtcaggaagcttgaaagggactaaattatttaacaaattctgatttcttaaacagtttttttatttcaagtactttttggttccctcttggtatcttaactatgcattttgagagaagaagtcactggtctggtcaattgggccgagaaatgtattttaatgtttacggacatgctggaaaaccgattattgtctttccatcatcgggcggcagtcagaatgaatatggtgactttggtatgattgaagcctgccaaagttttattgaccgcggtttggtaaaattttacacacctgattctttagatagggagtcatggttagctgagggaaaatcaggtcatgatatggctctagcgcatgaagcctatgatcgctatatcgttcatgaattggtaccactgattcgttacgaatccaattggaatgggatgatgatggcgactggctgttcaatgggagcttttcatacggtgaatttttccctgcgtcatccagatttatttgatatttctgtagccctatctggggtttatgatgcgcgtttctttacagatgaattttatggggatcctgctgtttactacaattctcctattgattacctctggaatcaagaagattcttggttcttagatcgctatcgccgcaatcgttttattgttgcggttggtcaaggggcttgggaagagccgcatattattgataccattcgcttgaaagaagcttttgaagccaaatcaattccagcatggtttgacttctggggttcagatgttgctcatgactgggaatggtggcgcgtacagatgccttatttcttaggaaaactggaagaagaaggacgaatttaatggaaaataggttcattgtcaactttaatgggttgacttctactaatatctgagagtggaacaaaaatcggtaaatcgttatgaaatggcaatttcgattttgttgtcccacctccgcacagtttattaggaagtccttatcacttgcgtagcaagggataaggacttccaataaaccactgcgtcaaacatttgatgttgcacagattgaaggagtttgagacttttgtcccaaactctttttgatattccgagcaatgaagattttgctagcctcatagtttcgatggatattatagaatttttattacatttatttaacaacaatatgcctactttataatctatttttaaaaaatagctcttgacttgtgttttaattcaaattataataaaaagtatctttttattcgttttaaaacaaatttttattgtttatttccaattaagagcaatataaatcaatttgtttttttttaaaaggaaactattatgttaatgatattagtatcgtccctaatgtttcagttgttatttttatttattggacgaagaagcatttttctatgggtttagggtgccataaagatcaatatgaagcatttttaaaggcgtttaaggaagcttctggatttggaaaccatttcttcccaaatattgaaaaagaagatgttctctttacagaatttatttctaggcaggaagatactcgtaacatttatacagattattttgaaaaacacgtttctttaaagttattgctgaaaacttatgactacttaaaaacagctaaacctcttaaagattgggtagtgatagataaaactttttcaatggacgatttcttgatagcttctaagcatctcaatattcctataagtcttcaactattggaaacagcttcagcgatgaatttttgcaaattggttagagtctattctactgaaggatttccttcaattgataatacaaagatagaccctcgaaattataacatttcttattacaaagataaaaatcaatcttttccaaatgagaaaaaatatctaccctttccttaatttaagtatgaacatcacttggaggtcatcattagtcatgttaaagaaaatactggcactgtttaaatttcagataaatataactctgtccaataaattctttttggtttataccctgcttttaccagctgtcaatttgtttttagctttaagcaaaagaggaatcggcttagatgctcaagagaaatttgtctttttgactccctatatttcttatattattgttattgccatgttatttggctgggcaggaaatattgtttctcttagagaaaataactatctcaaagttttttctagtctaacgggttcaaaattttatatttttgctgttaatttattagtcaattttcttttaacaagcgtacaaattaatattctgctctttatttttgaattaataactaaaagtgttgatttagaattatttgtgttttttaatattttaacctttttaggagtagcaatttgtttttttgcttttgctatctttttaaagctttctgtaaatgcagtaaccttgcaggctatcttaacatcttatttgttgctttctttgctatcattggagtatacgtctaaaaatattattttaagtggcttgtttcattttatgaatattttttctttggttaatgaaattggcttaactataagtggtaagcttgtggatgcagctcctttatacctgccaatatttgcttgggttattgtgggcagttactgtctgaaagagtcatcggtattttccataaaagataggaattaaaatgcagatcaaagattttaatttaaaaataaatcagcagttattattggataatgtcagtatgtcctttgccaatcaaaaattaaatcttattatcggtagaaatggtgtaggaaagacactgttattggatttaatttctgacttagaccataatagacctgaaaattttcacgattttcctaagaatagtcgaattatttatcatagtcaaggcttaccctttattgcagaggccactgtaaaagatacaataactttaattggagatttgtccgaggatagtgctatcacaatggagcgccttcctcaaaaaattagaaataatttgaataaaccttttggttccttgtctatgggagagcgcaggtatttgaccatctggttatttttgcaaatcgaaagagacttatatattttcgacgaaccgtttgctaatttggatctcagtgttatctctgatatcttgagtctcttttatgataaacttgatcaaggaaagcagttaatcatcacctctcatcaatttgactttttggttcctgaaaaaacacaaatcatttttattgaggacaaacaaatcaaatttaatgatagtcttacagcttttttagcctattatcattcatttggtcaagcttttgatatacaatagccttttaggttgattgggggaaataaaaaatcggctaaatataagtttacatttgagtattatcaaaaaatacggttaaatgtcgtttaacatttagccgtatttttaataggcttattcgaaaatctattttccatctattgattgactactttttgtcagttttagtctcgatccttgagactaaagtggcaactacctgtctgtctatttttctgttatcccttcaatgtgaatttcagaaattcaataaaatgattagcccaatatttttcgtgatgaatttcgttggccatgatatgtaaatcaatatgctccataggatgaccagtgcgtaggagggactgatagtagtggagcgtacagtcaatataggcctgattcatattaggagcaaattcatcgtcaacagcatcaccttctttggtaccaacttggataaagaccttgctgtttttatccagaggatggtgattcaagaaacgaaggaaatcgcgttcgctgaaccaagaggctagagaaaaaacgccgagatttccaaaaatatgaggataggcagctcccatataggccgtaatgataccacccatggaagatccagctaagagcgtattggcaggatcagtcttgctacgataggtttggtcaataaagggtttaacagtattaacaacccattcaccataagccataccatctccaccactgctagcagtttcaggtgtcgtcccaacatcggtcatccaaggagcatattcattgaggcggttgtcaccggaattgtcaataccaacaataattaacttaggcaattccttgtgttgtttgatggtcggaataattttccaagagtagcctgaaaaggattccttactgtaaaaaatattttgcccatcgtgcatgtaaagaacggggtaagtagcccaatcttccttgtcgtaatccttgggtagaagcacacgaacgcgccttttttcattgtaataagggacatcaagataatgctccatcatttcaagatagtaattattcagcttggttttctttttcacagtatatctcccttgaagaaattgaattaagcctattataacatagaaaaatgtgaaaaaatagcagagatcgcttaaaatagaaaatgaatatgaatgaacttaccctaacagttgttttgttattcagctaattcagtaattgtcgcctaggtatttaaacagtcattatagatcaattaactcacttttatgaacacagttgaaaaggaaacaacgccatcattttctggtgaaatatggtataattttaatgttatgacggagaaaaaaacaagaaagtatgctgtggttgatttggaggcaacaggtgctagccactcagcttccatcattcaagttgggattgtgattattgaaaatgaacaaattattcaaacttataccacggatgtcaatccccataagccgctttctaaagctattattagattgacaggaattacagatgctcaattgcagcaggcgcctgatttttccgaagtagcagctgacatctatcatctcattgatgattgtgtttttgttgctcacaatgttaaatttgatgccaatcttttggcagaacatctttttttagaaggatttgagctgctaacacctcgtgttgatacggttgaattggcacaagttttttacccaacttttgaaaaatattcattaggaaatttgacagagcttttaaagattgacttgtcagatgctcatacggccattgccgatgcgaaagcaacagcagaactttttttgaaattaaaacagaaaatgacagatcttcctaagttgactttagaaagaatcttgcaattctcagacagtcttctgtatgaatccaaattacctattgaagaagcttttgcagcagcttccaatcacttgtcatcagattatcaggaagtggcaggaattgtcctaaaaaaagaagagccttttttaaaagaacggcagttatcacaggattttgcgactaatatcgccttgttagaccttgaagaaagaactcagcagcttaaatttgcccaagttattgaagcgaaatttgaagatagtagggctagttttattgaggctcaatcaggcattggtaaaacctatggttacctcttaccgcttcttaatcagcatggggaggaacagattatcgtcagtgttccaaccaaaattcttcaagatcaaatcatggctaatgaggcacaggctttaagagaagcttttcatatcaatagtcacagcttaaagagtcctcaaaattacctcaaattagatagcttttataagactttgatgagaaaagatgataatcgtttgctcaatcgttataagatgcagcttttggtttggctgttggaaacaagaactggcgatcttgatgagatcaagcaaaaacaacgctatgctgcttattttgacgaaatcagacatgatggcactttgagtaagcaatcccttttttatcatcttgatttctggcagaaaagttatcaaagagcaaaatcaagccgtttgcttattactaatcacgcctatctcttaacgcgtatagaagatgatcaggcctttgttgaaaatcagattttggttattgatgaggcgcagagactttttttgaccttggagcagttttcaaggcgccaaatcaacatgactgagactttacagactcttaatcagcttttggagaattctcaaaatgttttagaaaaacggttgttagaaagcattcagtttgaattaaatcatttgttatatctttttaataaggaaaagcgacagttacttaagaaagaaactattaaacgcttgcggcaacatttatcagaattaagtctgaccgagttagcggatttacagtctttatttgaagaaccttattcagacttttggtttgaagaagatttcttttgggatcatcgaacggttcttctaaagtcagcccgtcttgattttactgactttacacaatttttaccggctaccaaaaagacttacttggtttcagccactcttcaaattagtcccaaagtgagtttagcgaaccttcttggctttgaacagtttacttttgatagtatttcgggagaaaagtcacatcagcaggctatttgggttgataagacaatgcctagagtaaatgatatatcagattcagagtatgaaacattgcttaccaaacggctgttgcaattggctcagctaaagcagcccatgttggttctttttaactctaaaaaaacgatgtttgctgtttctgatttgctggatgaagcgaaacttactcatttgactcaggagaaaaatggaagtccctttaatattaagcggcgttttgatcgtggagaagctgatatattgcttggaacaggaggtttttgggaaggtgttgattttgttgagcaagaccgcttaattgaggtcatcacgcgtttgccgtttgataatccggaggatttgtttgttaagaaattaaatcgtcaattacggcaggaaggtaaaaatcctttttatgactatactttaccaacaagcattttacgcttgcgacaggctgttggccgaacaaggcgcaataacaggcagttttcagcaattgttattttagatagccgagttgtcaataaaaactatggaaaaataatttatcaggctctagctagtcatttctccgtttcgagtcaacattttcagaagattctcgttgaagtgactcattttttgatataataaatagtattagtgtataaaagctaaatgatttagtaattaaaggaaataattaaggagacatgatgactaaattatcaagacgcgttttagaaatggaagagtctgttactttggcaacaagtgctcgcgctaaaacacttaaggctcagggacgagatgttttagaactttctttaggacagcctgattttgtaacacctaagaatattcaagaagctgctatgaaatcaattagagatggacgtgcttctttttacacaattgcttcaggtcttcctgaacttaaggatgccattagtcaatattttgaaaaattttatggatactctgtagagcgcaaacagattgtggttggcactggagctaagtttattctttatgctttgtttgcagctgttattaatccaaaagatgaggtgattattccaactccattttgggtgtcttacgcagatcagatcaagatgaatgatggtgtacctgtgtttatcatgacaagtgaagaaaatcattttaaagcaacagtcgaacaattggaagctgcaagaactaacaagaccaaaatgattgtgctcaatagtccatctaatccaacagggatgatttacagtaaggaagaattggaagctattggtaattgggctgttaagcatgatatcttgattttatctgatgatatttatggccgtctggtttataatggcgcaagatttacgcctatttcaacaatttcacagcctatttgccagcaaacaattgttattaatggggtatctaaaacctattctatgacaggctggcgtgttggctatgctgttggtgaccctgaaattattggagctatgtctaaaattgttagccaaacaacttctaatctaacaacagcggcacaatatgcagctatcgaagctttaataggtaatcaagatacagttgaagtgatgcgtcaagcttttgaagaacgcttgaatactatttatcctttgttggcaaaagttccgggatttcatgttgttaagccagaaggtgccttctactttttccctaatgttaaaaaagctatggaaatgaaggggtatgccgatgtaacagaatttacgacagctcttttggaagaaacaggtgtcgctttggtaacaggtgctggctttggtgcaccagaaaatgtccgtttgagttatgcaacagatatggtcactcttaaggaagctatcaatcgcatacaaacttttatggaaaaatagaaaaacaagttattcaacttaaataaaaattagaaaagagattattgtgtctaaagactatatatctattattgatgtgaaaaatcatgtcggtgaggaagttactatcggtgcctgggttgctaataaatcaggcaaagggaaaatcgctttcttacagttgcgtgatggaacagcttttttccaagcggttgcttttaagcctaattttatcgaaaaatttggtgaagaagcaggacttgaaaaattcaatactattaaacatcttaatcaagaaacagcaattgaaattaagggaattgtcaaagaagacaaacgttcgaaatttggttatgagttggatgcgactgacttaaaagtcattgggacatctgacaattatcctattacgccaaaagagcatggaactgattttttgatggatcatcgccacctttggctgcgctcacgaaagcagatggccattatgcagattcgtaatgctgtcatctatgcttcttatgagttttttgaccaaaacggctttgtcaaatttgacagtccaatcttatcgggcaatgcagcagaaaacacaacggatctttttgagacagactattttggtgagcctgcttttctcagtcagtcaggtcagctctatttggaagcaggtgctatggcatttggccgcgtctttgatttcggacctgttttccgtgctgaaaagtcaaaaacacgccgccatttgacagagttttggatgatggatgcagaatacccattcatgtcgcatgaacagtcccttgatttgcaagaagcttatgtcaaaacgctcattcaaggtgttcttgatcgggcgccgcaggctcttggtatcttagaacgcgatacggatttacttaggaagtatattgcccaaccgtttaagcgtgtctcttatgatgatgcgattacacttcttcaagagcacgaagaagatgaggatactgattatgagcatattgagcatggagatgattttggatcgcctcatgaaacttggatttccaattactttggaataccaacttttgttgtcaactatccagctagcttgaaagccttttacatgaaaccggtaccgggcaatcccgatcgtgttctctgtgctgatttgcttgctccggagggttatggtgaaatcattggcggctctgagcgtgaaacagattataatactttacttgcgaaaatcaaagagaatggacttaatccggatgattatgccttttatctcgacctgcgtcaatatggttctgttccgcactgtgggttcggtcttggtttggagcgtatggtgacttttgtagcaggaacgaaacacatccgtgaagccattcctttcccgcggatgctccatagaattgaaccatagatagtcttaactttattgctgaatctagtgaaagtcaaccctagatacaaatctggttcagaccgagaggctgggcataaattctgtttctagtcaaaaatattatgatatttaaaaagtcttaaaaccaacatttttgataacttgattttaaggctttttactatttgatgagtttttgcccagcctcttttatcgaagtaaaaactctcgtttggagcttacctcgttcgcaaacaaggaaaacaaaaccggaatttacagagctaaatagatttttatgttgaaaaatagtcctgtttacattctaaacaagtcctgagtataaggctgttcttttcttctgtaaagtccttgttttaatcttctgaatattttgctataataaaaagcatcaagcagatacaaaaggtgctcttcaaatagcttgaaaatcatcttttgtctctgtttcgttaataaattgtcaccgcctagaaaaagacgatggccattatttcataggaggaaaggtaatgacaactactataatggcaagctatagttatggtgaggactgctatcaagaaattcccgaagtcttaaaaccttatcatattaagcgggtggtcttaattgggggagagagagccttggccagcagtgaggatgaggttcgcagtattttggtgcaggcaggtatcgaagtgacgggcagctttgtctacggcgttgattcgacacaaacaaacattgataaactggtagctaatccagatgtacagagagcggaagctatttttggttttggaggcggaaaagcgcttgatacagctaaaatggttgctaaagaattggataaacctacctttactttcccgacaatttgctctaattgttcggctgggacagcgattgcagtcgtttacaatgatgatcattctcttttaaaatatggctatcctgattcgccgcttcatatttttattaatacgcgtgttattgcacaagcacctgagaagtatttttgggcaggtattggcgatggtatttcaaaagctcctgaagttgagcatgctatcttggaagcaaagaaaaaagggacagcagagtttcctcataccgcaagattaggtgaggctgtggcactatcttcaaaagaggccttttatcgttatggtcaacaagggctggaagatgtacgaaataacaaagtatctcgggcagttgaagaaattgcacttgatattgtggtatcaactggttatgcttctaacttggtcaatcagcctgatttttactacaactcttgtcatgcccatgctttttataatggcacaactgccatcaggcgcgaaggagaataccttcatggtatggttgtttcttatggtgtgttagtcttgcatgcatattttgatgaacaagaagaactggaacgtgtggctaatttcaacaaggcattaggattgccaatcagattgcaggaactaggattgactaaggaagatattcctaaaattgttgaagttgccttaacaactaatgaataccgcaatacaccttttgaccctgaaaaatttgctcaagctatccgtacggttgattatctcggtcagcaattataaatgagataaaaaagaaagaaggaaaaaatatgaaaaaaattcatactgataaagcacccgcagcaattggaccttatgttcaaggaaaaattgtgggaaatttactttttgcttctggtcaggttcccttgtcaccagaaaccggtcaagtgattgggacaactattgaagaacagacccaacaggtcttaaaaaatatttcagctattttaactgaggctggaacagactttgatcatgtcgtcaagacaacatgcttcttgagtgatattgatgattttgtcccttttaatgaggtatatgcaacagcttttaaatctgattttccagcgcgttcagccgttgaagtggcgcgtttgcccaaagatgttaagattgaaattgaggttattgctgaacttatttaaagagtttttaatagtgaatcaaaaagagcacttggcaaaatttattgatggatcacatgattaatcataagaaagccgttctgagaataagtcattctcaggctcttttctggttagggtggagaaaaatatgacgacggttttgaataagaaacaaacttataaagatatttttgatggccgcagttatcaaaaagtagatggtgccttatttaaaaatttagatcaagggattaaaaatgagttattagaggattatcctaagcttaaggatgatgattttattgcttatgtgcatttaacaaagtatagtcttagatatatgggtaaaattattgttcgggctcaggaaaaaaatgagagcatcaaaggttatgtaacagctctcagtcaggaaaaagacaatattaatgttgatgagcaactgcaggcaaagattacctttggacaaaaaattgccgatgctgtggctaaatttggcggttcttggacctttattatttcttttattttattgatggcagcttggatgctaatcaatcagttgcgcctgtttggtctgcattttgatgtctatccttttattttactcaatcttgctctatccactctagcagcagtgcaggctccgctcattatgatgagtcaaaatcgggcggcagaatatgaccgtttgcaagctttgaatgattttaatgttaataagaaatctgaagaagaaatccgttttctgcatgctaaattggatcatattgttcagcaagaccaaagtgagctgttagaaatacaaaaactacagacagaaatgctggcagctattagccgtcagttgacacgtttagaaagcatgcaaaatcaaatggagggagtgaaggaagaaaatgagtgagaaaaaaattgatttggttattgtgaccggtatgagtggggccggtaagacagttgccattcagtcttttgaagatttgggttattttaccattgacaatatgccgccagcattggttcccaaatttttggaattagttgaaagcagcggtgaaaatgataaagtggctttggtagttgatatgcgtagccgtctcttttttaaggaagtcagttctattttagataagattgacttaaatgagacaattaattttcgcattctatttttggatgcaacagatagcgaattggtttcacggtataaggaaacacgtcgcagtcatcctttggctacaactggccgtgttctagatggaattgctcttgagagggaattgttagctcctttaaagaatctcagccaaaatgttgttgatacgaccgatttaacaccgcgtcaactccgtaaaaccatttccgatcaattttctgttgagaagagtcaaacgagttttcgcttagaagttgtcagctttggattcaaatatggtttacctttggatgcagatctagtttttgatgtgcgttttctgcctaatccgtactataaaccagaactgcgagataaaacaggactggataaagatgtctcggattatgtcatgcagcatcaggagtcagaagaattttatcaacacttattggctttgttagcgcctattttaccgggttatcaaaaggaagggaaatctgttctgactattgctattggctgtacaggcggtcagcaccgcagtgtagcttttgctcatcggctggctcaagatttaggacaaaattggacggttaatgagagccatcgtgataaaaatcggcgtaaagagacggtgaatcgttcatgagaaaacctaaaataactgttattggcggtggaaccgggatacctgttattctcaacagtctgcgtcatgaagaggtagatatcacagcaatcgttactgtagcagatgatggcggcagttctggtgctattcgtcatgttatgcaattaacgcctccaggagatcttaggaatgtcttagttgctatgagtgatatgccaaaattttatgagagaatctttcaatatcgctttaacgctgaagacggggcattagctggtcatcctttgggaaatttaatcattgcaggtatttctgagatgcagggttccacttacaatgctatgcagatattgtcaaaatttttccatacaacaggtaagatttatccttcaagtgaaaaggctttaacgcttcatgctgtttttcaggatgggcaagaagtggttggtgaaagtcagattgccaagcataaaggaatgattgatcatgtctatgtggctaatagctatgacgatgctaagccgactgccagtcgtaaggttgttgatgctattatggaaagtgatatgattgttctaggtccgggttcgctcttcacttctattctcccaaacttagtcattgatgaaattggaaaagcactctgtgagaccaaggcagaagtagcctatgtctgcaatattatgactcaatatggtgaaacggaacactttacagatgctgatcatgtgcgagttctcaatcgtcatttggggcaaaactttattgataccgttttggttaatgtagaaaaagttcctcaagattatatgaattctaatcaatttgatgaatacctcattcaagtagagcatgactttgctggacttcaagagcaggtaccccgagtggtttcttctaattttctttgtttggaaaatggcggtgcttttcacaatggtaaaagtgttgtggatgaattgatgaatttaatcaaggtgaaagagctatgagttttaccacacaggtgaaagaagaaatcttaaatttggattcagctgacaaaaatgaattgtcggctattattaaaatgtcagggagtttaggcttggcagataaaaagctcagtttatccatcattactgaaaatgctaaaattgctcgccatatttacgcattattggaacgactctatcggattaatcctaagataaagtaccatcacaaaaccaacttgcgaaaaaaccgtgtttatactgtttttttagatgacaatgtcgaacaaatattagccgatttacagctttcggattctttttttggaattgaaactggcattgaacagcaaattttatctgatgataatgctggccgttcttatttgaaaggagccttcctttccactggatccatccgagatcctgaatcgggcaaatatcagctagagattttctctgtttatcttgatcatgctgaagatttagcaaaactaatgcaaaagtttatgttagataccaaggtgattgaacataaacatggtgcagttacttatttgcaaaaagcagaagatatcatggattttctgattattatcggcagtatggaaggtatggaagcttttgaaaatattaaggttatgcgcgaaacaagaaatgatgtcaaccgtaccagcaatgccgaaacagctaatattgctaagacgattaatgctagtatcaaaacgattaataatatcaacaaaataaaagaaactgttggtttggaaagtttgcctatagaattgcagcagattgcccaaatcagagcagcccatcctgacttttctatccagcagattgctgatagcttagctgtacccttaaccaagagcggcgttaatcataggttaagaaaaattaataaaattgctgaagatttataataaagaaaggaattgaataaggattaaacgctgtgtcaaaaaacagaaatcttagagactgatgactctttagtcttatcctattttgacttttcgtttttgacgccttttttatcttactaactgaacacgccctaaaagcgtcatgaaaaagataaacttccttgtgtgcaagtcacacggcgtcagtttcctattttcatctcgctttcttgacgctttcactttcaaaacgattatttttgaaagtgaaagctaatgcacagtgtagaaaatgcttataggcattttcgtttagtgacgcggagattttatctcccgccactaatcactgggtagacgggctttgtatcttactaactgaacacgccctaaaagcgtcgtgaaaaagataaacttccttgtgtgcaagtcacacggcgtcagtttcctattttcttctcgctttcttaacgggctttgtatcttgatttaattgaacacgggctgcggattgtggcaaaaagatgagtcctcctagaatcttaatgattccgcgtcgtactccctattttgcctttatccgcttaacgccctttgtatcttaatttaaggaggaatatgatgacttgtacaaccattcttgttggaaaaaaggccagttatgatggttctaccattattgccagaacagaagattcacaaaatggtgtcttttgtcctaaaaaatttgaagtgataaaatcagaagctcaaccaaagcattatcgatcggttttatcaaattttgaaatagatttacctgataaccctttatcctatacttccgttcccaatgctttagacaatgaaggtatttgggctgaagctggtattaatgctgctaatgttgctatgagtgccacagagaccatcacaactaatgcacgtgtgttgggagcagatcctttagtagcatcaggtattggggaagaagatatgctgactttggttttgccttatattcagtcagcgcgtgagggtgttgagcgtctgggcaaacttctggaagaatatggtacatatgaatccaatggtatagctttttcagatatcaatgaaatttggtggttggaaacaattggaggacatcattggattgctcgccgtgttcccgatgatgcttatgttactaatcctaatcagttagggattgatcattttgagtttaataatcccgatgattatcgctattccaatgatttaaaagatttcatagctgacaatcatcttgatttgacttattcaaatgagcactttaatcctcgttatgcttttggcagtcaaaaagataaggatagacattacaatacaccacgttcttgggctatacagcgctttttaaatccagaaatcgaacaagatccacggagtttctttattccttggtgtcaaaagccttatcgtaagattacggtggaagacattaagtatgttttgagcaatcactatcaagatacaaattttgatccttatggatcagaaggagaccgccttagtcaaacaacttttagaaccattggtattaatcgaaccagccagacagctcttttgcaattacgtcctaatcaaacaccagaaactagggggatccaatggctttcctatggttccatgccttttaatacgatggtgcctttctttacgcaagtttcaaaaacaccagcctattttgccaataccagtgcaagggtgacaacagataatttttattggactaaccgtttaattgcagcccttgccgattcacattatcatagacacgaaggaaatttagaagcctatgttgagaaaacaatggcagcagggcatgctatgatccaccgtgttgatgaagctttagcaaaaggagaagaagttgagtttgagggggaaaatcaagccatgagtgattttattgaggaacaaacacaggttcttctggaacaaattctctttgatgctagtaatctgatgaccaatcgctatggtgttagtgattagtttcaaatgattatttttccaagtatgaacacctaaaaaatagagaagctaaactttatatgattttcaagttagatgttttctgtccaattcttgggatcagtatagtaagtttttcagcttcttttttatgctaaaaattttgaaatataaaagcttgcaaaaattttgaaatatggtatacttaaccagtaaataattaaccggttaagtaaaggagtttaaaatgcggaaaaaaccttttattatcgtttctcttctgttagtcattttagcggttgtgatagcttttttattggcaaaagatggagagaagagaagtaatggtaaacttaatgtggtcacaaccttttatcctatgtatgaatttacaaaaaatgttgttggtgatcaaggcaaggtgtctctattgattaaggcaggaacggaagttcatgattttgaaccttcaaccaaagatgtgacaaggattcaagaggcagatacttttgtttatgattctgacagtatggaaacttgggttaaatctgttaaaaaatctgttgatacccaaaaagtgccatttgtaaaagcaacaggtaatatgattttagcaccaggagtaacagaagaagaaggacatggtcacaaagggcatcaccatgcttatgatcctcacgtttggctgtcaccaaaacgtgctattaagttggtggaaaatatccgtgacgctctttctaaaaaatttcctcgccgtgccaaaatcttcaagaaaaatgcagcaaactatattgacaaacttcagaccttggacaaggaatacgcagaaggtcttgcaaatgccaagcaaaaatcttttgttacgcagcatgcggcctttggctatttagcgcttgattatggcttgactcaaattccaattacaggtttaacagctgagtctgaaccttcagctaaacgtttggcagaactttctaaatatgttaaagagtatggcattaactatatttactttgaggaaaacgcttcatcagctgtttctaaaactttagctgatgaagctggtgttaaaacagctgtgcttagtccgcttgaaagtttaacacaaaagcaaatggatgcaggggaaaattatttctccgtaatgcgtgctaatctaaaagctttgaaaaaaacaacagattctgccggtaaagaaatcaaacctgaaatggatagcgacaagacagttgctaatggatattttaaagataagagtatcaagaatcgcaaattatctgattggtcaggaaaatggcaatctatttatccttatttagaaaatggaacccttgatagtgtctgggattataaggccaaatctaaaaaagacatgacagctcaagagtacaaagaatactatactaagggttacaagacagatgttgaaaaaattacgattgatggtaagaagaacactattacttttgtgcaaaagggtaaggagcacaaatatacttacaaatatgtaggttataaaatccttacttataaaaaaggaaatcgtggtgtacgttatctctttgaaactaaggataaaggggctggagaattcaaatatgttcagtttagtgaccatggcattaaatcacaaaaagcagaacacttccatcttttctggggcagcgaaaatcaagataagttattggaagaaatggaaaattggccaacctattatccagctaatttgacaggccgacaaattgctcaagaaattgtagctcattaataacttttagctaaaagataaagaaatagtctttcatgattgtatgaaaccatgaagggttatctttttatatactttgcagaatgaaacttgcttattttcagaatattttataaactaaatgcctaaacaaaatttttttccgaaaggatagatatagatgacaaaaaaagaagttggccataactttctggctcgtttaggcaagaaacgtttacgtcccggtggaattacagccaccaattggttaatagaacaaggacagttcagtaaggacagccacgtgttggaagtcgcttgcaatatgtgtacaacctcgatagaactggcgcaaacttacggttgttcaattgaaggtgtagatagggatcctaaggccttggaaaaagcgcgtgctaatatctgtgaagcaggcttggatgaattggttcatgtgcagcaagctaacgctatgaaactgccttttcccgatgattcttttgatattattattaatgaagccatgttgaccatgttaggcgatgaagccaagattaaggctattaaggaatatttgcgtgttttgaaacccggcggacgtctcttaacgcatgatgtttcttttacagaagaaaggatggaagaacaattagcaagtttacggcaaaccatcaatgctaatgttgaacctctgcatgttgctgattggcaaaagttgtttgaagagcagggcttctcatctgtcaaactgaactatggtaaaatgaccctcatgtctattttgggaatgattaaggatgaagggttttggggaactctaagaattacttacagaggtttgaagaaagaaaaccgtcagcaatttctgaaaatgtaccgcttctttaacaaagcaggaaaagatttgatctatattgcagtttgcagtacaaaataatatactagaagtaggtttaaatttattaacggagctaaaagaaaggagtctttatggtttatattgacaagattcagcacagtcaggtattagacttaaaaacagaagtcccaattgaagaagagcaaatgctcagtaaaaccttggttcaacgaaaagacttgggcatgactattttttctttagataaagatcaagaaattggtcgacattgctcacccggtgatgctatggttaatattttgagtggtttagctgaaatcaccattgatgaagaagtctttgaagtagcagctggtcagaccattgttatgccagccaatattccgcatagtctgtatgcaaaagaggcttttcaaatgcttctagtcgttgtgaaaccagaggtagaccatgattgataatcttttagacttgataaaataccatgatggacaaattgccagtcgctcattgaataaaaagttggaaatagaaaaccctattactctctatgctatgccagctggtgagtctattagcaatgaaagcagcaaattagccaaattgattcaggttttagaaggcagcctgcaagtggaaatagcgggagaaaagcatattattaatcatcaaggattgattagcattgctgccaatcaggtgcataatctctatgcccttaaagacagtaaagtgttgcaaatagaagtggagtcacaaaagaagcttatataagaaaaagaaaaccttgccaaagcaaggttttctttcttattatttgaggccgtattttttgttgaaacggtcgacacgtccatctgcttgtgtgaatttttgacgtcctgtatagaatggatgtgagtctgatgaaatttcaacgcggataagtggataagtttcgccttcaaattcaacggtttcttttgacgtcttagttgaaccgctgaggaattggtaacccgttgaagtatccataaagacaactggacggtattctggatgaatatcttttttcatttttaaaaatttcctttctgccatagctcttttcgagccatagttagtaaccattttattttaacaaaaaagttgacgactgacaagttttttatactattttagcagattttttaattcctgataaatgtcctcattttctgccaaactataagaattggcaccacttgctaatggatggccgccaccagcatgtcttttggcaacttcattgatgacagtggacttgctgcgtaggcgtacgcggtaatggccatctgcttgttccacaaaaatggcccaaacttggacagtatcaattttccctgggctagaaacgatagcagatgtttcggcgtcagtcaaattaaattttttcaggattttctggcttagaataatacgtgctgcaccgtttttatcaatttcaagattttcaaaaacgtaagcttgtaatttggcaattttataagggaaagaatccatttgacgtgctaaggcagcaaaatcaaagtcatatttgaggagctcactggcaatgataaatgtttttgacgttgttgctggataaagaaagcgccctgtatcaccaagaatccctgcataaagcaaacgggctgcttgatctgaaagtttcagttgattttgcagggcaaagtcagtgataatttcactagcactagaagccttggtatcaacataagataagtcaccataatggtcttcatcaggatggtgatcaattttaataagaaagttaccatttaaatagcgttgatcatcaatacgcggacgattagctgtgtcaacaacgatgaccaaagctccttcgtaatccttatcagatacgtcatccatttgagccagccaagaaaggctaggttcattataacctgttactttcaccgtcttttgggggaaattgcttgtaatcatttctttcaagccgacctgactgcctaatgcgtcagggtctggtttcatatggcggtgaataataatggtgtcataagctttgattttagctagaatagttttaaaagcagtcataaattcctcaattcatttttttacattatatcatagaaaaagccaatcttagaaaggattgactcttatttttatttgatagctttataatcaacttccaatgctcgcttgacagctggacgctgagcgattctttcagtccagtctaataagtgttgataggtgcctaaagcgagaaatttataagctccttcataaagggcatcttgtgctaaacgtccataccaagaccagatagctatatcggcaatggtataatcttcacctgcaatgtagggcttattagctaattctttattcaataagtccaattggcgcttggtttccatggtaaaacgattgataggatattctaatttttcaggagcatagctgaaaaagtgaccgaaaccgccgccaacaaagggagcagcccccatttgccagaagagccagttaagaacttctgttctttgtgcccaatctacaggaataagatggttaaatttatcagccaaataaagtaagatagaaccagattcaaagacgcgaatagcttctctattagacttatccaaaagagaaggaattttagaattggggttaatggcaacaaaatcagaaccaaattggtcgccatccatgattgaaattttgaagaggtcataatctgcttctttgacaccaagttcgcgtaactcttccaacattacggctactttgagtccgttaggagttcctaatgaataaacctgtaatggtttatcaccttggggtagtttttggtcaaaacgactgccagcagttggacgattgatagcagaaaattttccttggttgctttcctcagctgaccaaacttttggtggaatatagtaagacatcgtttctcctttcaaattttaagatattttcaaaatatagcacagaaaaatgagaaaatcaactgaaatgtgttatgatagatagcaatagaaagtggagtctgataatgaaaaatactttacatgatttagtaaagaccgaattacactgccatttggatgggtctctatcatttgagactattcgagaattagctgaaatggcgaatatagcgctgcctgaatcagatagtgaacttgcaaaattggtcactgttcctgaggattctgagaccttgcttgattatttaaaaacttttgactttattcgaccactgttacagacacaaaaagcgcttagtttagcagcttatgatgtggccaagcaggctgctgctgaacatgtgctttatattgaaattcgctttgctcccgaattatctatggataagggattgagtgctgttcaggtagttgaggcggttgaaaagggactgcaaaaggctcaaagggattttaatattgttgccaaggttttaatttgtgggatgagacagtcctcaaaacagttgacaaaagagatttttcgtcaaattaaccaagccaaaagtttagaatttgcaggctttgactttgcaggaaatgaacatgattttccgccacaagaaatagcagatctcattcgttttacgcaaagattggatcgtcctatgacttttcatgctggtgaatgtggctgtcctagccatattgcccaatcaattgccttaggaatcaaacgtttggggcatgtcacagctatccatgaccatccggaattgatagcagactttgttgagaataaagtgacagcagaactttgcctaaccagtaaccttcaaactaaggcagccaaatctctagcggaatttccctatcaagagctctatgaagctggtgctaagataacaattaacacggataaccgtactgtctccaataccaatttaacgaaggaatatcagttatttgtggattatttcggaaccagtttggcagatttttatcactttaatcaaaatgcgattgaggcatcttttgcctctgaagctgaaaaggcagaacttttggctgaactgaaaaaggcctatggacaagactgattaaatttttaaaagtcgaaaaactgtgttataatcaaattattattattttggagggtattatggctttcgctaagattgtttttgctagtatgacaggaaatacggaggaaattgctgatattgttgctcagaaacttgaggagctaggacatacggttgatgttgatgaatgcaccactgttgatgctgatgaatttcaagatgctgatattgctattgtagcaagctatacttatggtgatggcgagcttcctgatgaaattgtcgatttttatgaagatttgcaagacttagatttatctgggaaaatctatggtgttgttggttcaggagataccttctatgattatttctgtaaggctgttgatgattttgaaatggctttcgaaggaacaggggcgacaaagggagcagaatctgttaaggttgacttagcagcggaagatgaagacattgaaaatctcgaaaaatttgcccaagaaattgctgaaaaggcagaataagttatctttatcaatgataaaagtaaagcaactcttagtttagactgttttacttttttgttttataactgaattttcacgagaaaaagagtataatgaaaaagaaagcgaattctttcagcgttaataggtctacttttagatatgaggtgatgcagattgaagaatagagattatgctttcggttttcacgatgatgtcaagcctctttactcaacaggtaaagggctgacagaagaagttgttagagatatttccgaaatcaaaaacgaacctcagtggatgctggattatcgtttacgttgtttggaacttttttacaaattgcccatgcctaaatggggtccagatttgtctggtatcaattttaatgatgttatttattatcagaaacttagcggtcagccttctagaagctgggatgatgtgcctgacgatatcaaaaaaacgtttgagcgtttaggtattcccaatgcagagcgtcagtttttatctggtgcagtagcccaatatgagtcagaagtggtttaccacaatatgaaagaagaatttgaaaaaatgggcattatttttactgatacggatacggccttgcaggagtatcctgaccttgtgaaaaagtattttgcgtcagttgtttcgcctgctgaacataaatttgcagctttaaatggcgctgtctggtcaggcggaacgtttatttatgttcccaaaggggttcaatgtcagattcctgtgcagacttattttcgtattaatggagagaatgctggtcaatttgaacgttcgctcatgatcattgaagaaggagcttctattcaatatattgaaggttgtacggctccaacttactcaaccaatagtttgcatgcagcgactgttgaaattattgtcaaacgtgatgcttcttttcgttacaccactattcaaaattggtctgataatgtctataatcttgttactgaaagaggtacggtagaagaaaacggaaccttagaatggattgatggtaacttaggcagcaaagttaatatgaaatatccttgttcgattttaaatggcaggcaggctagaacctctgttttatctatgtcttttgctaattatggtcagcatttggatgcaggctgcaaggtttatcacaatgctccgcggacttcaagtacgttgatttctaaatcagttgccaaagatggcggtaaaaccgattatcgaggttctgttacttttggaaaaaacagtgctggttctaaatcacatattgaatgtgatacgattttaatggatggcgagtctagttcagatacgatccctttcaatgaaatccacaattcagatgtttctttggagcatgaagcaaaggtttctaaagtatctgaagaacaactttattatattatgagccgtgggattagtgaggaagaggcaactgctatgattatcaatggtttcatggatcctattactaaagaacttccgatggaatacgctgtagaattaaatgcacttattaatatgagtatggaaggttcggttggttagaaaaatcttgttaaataatgaacttaggagttggaagataagcattcttaagctcctaagctagattgtttgcttgaagggcagaaacagtagttagatttactgataagtatacagtgcttatcgtcagttggctgattataaagctttgtgtaaacttccacgagattctaattcaaatcattttaaacattgcgattatattgcttgttttttcatgcttatctgtaaatttactgtcaatcgtattcatttttaataattagcgcgtaagagaaaattttaagagttaggaagaccctttggtgaagggaaaggatgggttgaaaagatacttgaattttctgctgctttcttttataataggcagacaatacaatatgatttattaatgctatttaattcgttttagagaaatactatgaagagaatacatgtaagatataagcaaattagacgcttttttcttttactgggacttgtgattattgctgcctatgtagcctttgtcctctatcgctattgggatcattggcttcttttaagtaatccccaaaaagcgatagagaattttgagcagcaatttcgttcggaaaatctctttaattttctcgttttaactgttttaacgagtttaacagccgccattccttttttatctagttctgttttatctgtttttaatggggtagtttttggaccgtggattggcgttttgatgaataccatagggaatatcttaggacatttttttctgattcagatgatgtcacgtgttgatttgactgaaagagacagtaaatttaatcatcatcttgaaagtctctctcaaataaaaaatccttatcttgctctgacattgggctatatgataccttttattccctcttttttagttgattatatggttctagatacaaaaataccttggcaccgttggctgccttgcctcaccttaggtgttataccaaccagtatcctttatgcatttggaggccacgccattatagctggaaatatgaaacaattaatactgattgttttacttgcactgatattactggctatttataaacgatttgaaaaaaagaaaggctagaagcaaggccttttttttgttataatttaagtaaaaggagaggctatggacttacaagaaattaggtcacaaattgatgatgtggataaagaattggtgcagtgtttagaaagacgaatgactttggttagtcaggttgctgattataaaaaagcaactggtaaatcggtcttagatacaaagcgtgaacaaatcttgttggaaaaagtagcaggccttgttgtcaatgatacatatcgctccaccatttcagctatctttgctgatattttaaaacattctaggaattatcaaaggagagcattagatggggattaagatcaagtcttttcttgatttaaagaaaaacagtcatctgttgttcatctcgggtgcagctattttagttggtttgttggttggcatcgttgatatgatttttggaattgtcttaaatactctgactgcttttcgagaaacgcattttttatatttgattccttttctttttctagcaggtcttttgattgtttttatatatgatcattttggcggtaaaagtatcaaaggaatgagtttggtttttgatgttgctgatgaaagagaagtgactattcctaaaagattggttccattagctattttttccacttggttaactcatctttttggtggcagcgctggtcgagaaggagtggctattcaggtaggagcagctttgtctcatgcgttctcacctgtttttaaatttgaagagtcttctagaagttttttgattattggaatcgctgctggctttgcaggtttatttcaaacgcccatggcagccatattatttgcccttgaggttcttgttattggccgattggaattatcaaccttattacccaccagcctagctgcttatactgccagctatacctctcaattattggggttaaaaaattttacccatcttattaaagttcacatgacgttaaatcctgtcttatttgtgaaatttgctttattaggcattatctttggtttagttggaacatcatttgcttacttactgagaagaacaaaattaagtttaatattacgctttaaaagaccctatcaacgtattatgatcgtagggcttttactaagtgttttgtttactactgctggtatggggcgttactcagggctgagtactgatttggttactgctagttttgctaaaggaacagtctatccttttgattggctgtttaaattaattctaacagtattaaccttatcagcaggttatcaaggcggtgaggtgatgcctatgtttaccattggtgcaacacttggtgcggtattagcccccctatttcatttaccaatagcttttgttgcagctttgggttatgctagtgtatttggcagtggaaccagtacctttttagcaccaatttttatcggtggtgaaatttttggctttgaaaacattccttacttttttattgtggtttgttttgccagcattgttaaaaaacaaatcagtgtttatggtgcacaaaaggttactgcttaatatcacctgattaattaaaaagaagaatcctattgataagataagtatccttttcttatcacgtattttataaaaagaaagcattatgattgaaaaaaagattaaagaagcaaatgaactgtcttactctattttgctttacttagcttttatgggattgctaattggtgcccttgtaggtcttgttgatactatctttggacgagttttaatctatttgagtgctgttagagatgctaatccttggtactggcttccctttttgggaatcgctggtttaataattgtttatttatatcaaaagtggggtgctaaaagcagtaaggggatgggtttaatatttcaagtaggttttgaagaggaagaccatatccctaaacgcctcattcccatggttattgtcacaacatggttgactcatctttgtggcggcagcgctggccgtgaaggtgtcgctgtccaactaggtgcgacagtttctcactggtttagccgattattccattttcccaataaatcgcgtatttttctgctttcaggaatggctgcaggttttgcaggtttgtatcagacgcccatggcagctatactatttgctttagaagtattagttcttggtaatctaggactttctgctttggttccaatgaccattgcttcttttacggctagtttgacctctcatagtcttggtttagaaaaatttgcacataccctgtcaaggacaatttctttgacaccgactgtttttattcagttgcttattttaggacttatctttggtttagcaggcaatttatttgcttttttattagcttggtgcaagcaagtgcaagcacgcctgcttcctaatctttatagacgtatttttattgtcggcttgctgcttagtttactttttctagtcctttatcaaggacgttattctggtttggggactaatctgatttctgctagcttttctgatgggaaaatttatgtctatgattggctgctaaagctttttctaacagttataactctggcagcaggttttcaaggtggagaagtgacgcctttatttgctatcggttcttctttgggcgttgttttagcaggcatttttcatctgcctttagaatttgtggcagctctgggctatatttctgtctttggcagtgcaactaataccttcttagctccaattttaattggtggtgaagtctttggttatcagaatttaccagcttattttatcgcggtgacctttgcttatgttgttaatcgtaagcagtctatttactcgcttcaaaaaattagagattagagaaaagtagcttactctttttgagaaaacgcagcattcttaaaaattgagtcacatacctgttaaaatattttcctttacaatcaagatgaaatttgttacaatactctttgtgtgtaatggacgcacgaaaacggctaatccgctgagacagagcacttatgattagtaagagaaggagaataaaaaatgaatccattaatccaaagtttgaccgaaagtcaactccgtacagacattcctaacttccgccctggtgacactgttcgtgttcacgcaaaggttgttgaaggaaaccgtgaacgtgtccaaatttttgaaggtgttgtcatttcccgtaaaggtcaaggtatctcagaaatgtatactgttcgtaagatttcaagcggtgttggtgttgaacgtacttttccaactcacacaccacgtgttgaaaaaatcgaagtgactcgtcatggtaaagttcgtcgcgctaaattgtattaccttcgtgcattgcaaggtaaagctgcacgtatcaaggaagtccgtcaataggaacggtctattagattgtctagattgaagaaatggtttcttcaatcttttttattgacaaaataaagactcttagaatactgttatatcggcaattctaagagttcataattattatcttctatcccaaagtttttctatattttgaaagactggaaccaaagtgttccactcttttttatttgtcttcagaattcaatggcctgtcttccaaatgattggataaatttttgaacatatcattcaaagtagacagacgtttttccacttttttaacagaggcttctaaggtgaaaccttcttctagcatttcttgaattaaaagtatttttttgatattcatataatcatatcttctggttgttccccctttattgttttgagagtggatgattcctttttcttcccaataacggatttttcgaatagggataccagtgattttagaaacctcaccgataccgacaactaatttttttaggagtttgacatctaataatgccgaataatcttcgtttcttttttccataaaacaagtccttttaagttttgttgatacctctattttacaatattgagagtagaactacaatttttcttgactttaatatgtatttatattacaatcaatgtagtttttctacataaaatgtttatttgtttcggggagggcttggaaatgaaagaaaatcaattcaaaataaatgaaataagtttagccattctattattttggtgtggtcttatagttgtcgccagtaattacataacgattcctttaatgtctgcttttactcagcagtttcatgttagtgcagaacagacagcttggttgggaaccagtttttctttcgcctatgctttaagctgtctcttagttggtgttttatctgatcgatttggcagaaaaagaattatggttggagggttgatcttattatcagttattactcttatcattccttttggcaatcagttgtcttggttaattatgggacggatcatgcagggcatagccgcatctagctttgcccctgtagctgttgtttatatttccgaaaaattttcaaaagagattaaagggacagttgtaggccttgtcagtgccagttttttgatttcggcaattgtcgggcaaattatgagtgcttacattagtcggttgttgaactggcaggctgtcttttgtacatttggaataatttatttgctaacagccctaatcttatatagctatgcttcacctgtttctaaccaaagtaaaggaattctattttctcaactgtttaggcattattgggaggtattaaggaaaaagaatttaatcaagctttatctgattgctctgactttattatttgcatttgtagctttttacaccgttttagagggttattcagttcatacatttcatttaagtaaagataatatttttaagataagagctttaggtatgattggcatgttgtttgctccttttgcggataaattagctagaaaatttgatataaaatgtctactcatcctttctttgctgttttcgcttgtatccctttttattattgctttttgtccatatctcaatgtattgattataatgagtcttttatttgtagcaggaatttcaatcattgttcccactttaattattttagggggaaggtttggacagaatcaagctggaatcgctgtctctttttacacctttattttgtttttaggtgctagttttggaccgattgcgggtgttcagttattgactgtactgggagcaaaagcaacctttttgactttagctttattattgttgttcagtatgcttgttgcatttactttggatattaaaggagaacagtagtatgaagagagtactggtattaggagcaactggcaggacaggaagctttgtcataaaagaattgtccaaatacaaatctattcagttaattgctggcttaagaagtcaaaaagataaagaaagactgcccaagataaatgcagccatagagacagtagtgattgatattgctgacgtctgcagtttacgtaaggctcttactgacagtgacatagttgttcaagccattcgtttacggggagatatatcagagaatgctttaattcaactggatcaacggatccatcaggcctttaatccatcaaggaaaactcatcttgttacggttggaggcgcaggggctttaaaattagaagcaaatcagcgtttttgggagaatgaatattttccaagacaaactctgcctagaggaattgctcatgctaggcttagagactatttggaaaagtcattttttaaccacacttggacctatttgattcctccgccagtttatgttgctgaaggggcaagaactggcagttataaccgctacagttcggctcaaaaagaagacttttttctcagtaaatccatttcttatgcagactttgctttggcgataggaaatgctgtaatggaagagtggcagggtgtttacttgattgcagaaaaggaatgatatttcatttaattgtttcaatcagcttggtaaggcttgcattcatttttagtctagggtacaatagaaagagttgcttgtccccttagttaaatggatataacatctccctcctaaggagcagttgctggttcgattccggcaggggatataagatagtaaaagcactgttaagcagaaaaacttttctgcttaacagtgctttttgttattttctgggtgcaaaaccaactactgtcatgtgttttcccagcgaaagttattcttgcaggtattgtagaaaaagatcatgcaaccaatccgcaaaatgagtgacattttctgaaggaccatgctcaataatccatttcataagagtgaccacatttgccgtaaaaatttctgctaagagttgtggtggtaaatggtcattgtctttggtggtggctgccagatggttaatataggtttgacaaagtttactgaaggcctcttcgaaattacccgctcctgttaatggtgttttgagaagagcttttagtaagcgggcattttcttgataaaattgataaatatctgctagataatcttttaagttttctgggctaacctgtgactggtatttttgagaaaatatggtttctaattgggtaattgtcttggctactaattgctccacaacatcatatttgtctaagtagtgactgtagaatgttgaacggctgacaagcgctttctgacaaatttgctggatagttaatttactaaaatcttcttctaaaatgagttggatgaccgctgtttcaatgtcgcgtttactcttaaaaacgcggatatcttgtgccatataattggctcctttttgttttttaccaaacatttctggacaaaatgttcaatttcatacagattataagaatttatggcttgtttgtcaagaagcttccttctatactgtgattatcacatgataaggagaaatgttatgttttatcgctatacaggaaatcaacaatttgatttacaaattaatcgtctttgcttcccttttgaaggtaacgaaaaagtggaagaagatctcaagctaattgttcctcaattaaaagatatctcctcttggaacaaggtttggaaagagtttgctttgatgcgagaagccaagggagattatgcattggcagcgtcttatttttttggagccagcttttatcttctagaggatgatacagatagagaattaatccaagagcatcgtttgcaaaatttttatcgtgcctatggagatcttggctttgaacaacatgaaatcccttatgataatacaagtttgccagcagtcacttttatgcaaccttctgctaagaaaaatttactcatctttggaggttatgacagcaatctggaagaactcattctatggttttcacctttaagaaataatggttataatctcattatttttgatggtccgggtcaaggaaatatgctttttaaaaaagagaaaagtcatttcataatgaattttgaaaagccggtggcagctgttttagattatttttctttggatagggtggcagctttgggactctcctggggaggtttctttgtcatgcgagcagctgcttttgaaaagagaattgagaagattattgctttagacattttttatcaaggattggatgctctgaccattgctatgaacccagttttagcttttatttttaaaactttagtcaattttaagtgtaagacatggattgatgttttgcttacgcatgctatgacaagagatttggatttaaattggaaaataaagcgaggttatcaattgactgggacaaaaacaccttatgatttgattcaaaatattaaaaaacacaatatgaagggcttgggacctctgattaatcaagaagtcctcctattagctggagaaaaggatcaatatgtgccagttaaacgtcttgggcaaatcaaaaaagaactcagcaatgcagcagaaataaaaacgcatctttttacgcaggaaagtggtggcgaacaacattgtcaggctggcagtaatttagctttgctggctattaaagactttttgaaaatttaaattttccttagtcaactttgcgggggatgaccttatctagtggatgatttttaccagagtcttaaaacaagagagtgagaaaattgatatctacgacatcccgattttgttccactctttatttttatgataatatttcatttttcagatactattaagtcttaaaaatgatataatgttttttataacattcttatggagtaattatggcaagcaaaaaaaagccgattgatagtcgggtggattattctcttattttaccagttttctttttagttttgataggacttttctctgtttatacagcgacaattcacgactatcctagtaaaattatggtcgtgatgggacaacagttgatttggttgattatgggagctgctattagttttgttgtcatgctctttagtacagaattcctttggaaaatcactccttatttatatggcttagggttaattttaatgatttttcctttgatcttttacagtcctgaattagttgcttcgacgggtgctaaaaactgggtttccattggttcagtgaccttatttcagccttcggagtttatgaaaatttcctatatcttaattttagcacgcttaacggtcacttttaaacaaaagtataaagaaaagaatttgcaagaagatgggaaacttttactctggtttgcattgttaacactgcctattatgattcttttagctttgcaaaaagatttgggaactgctatggtttttatggctattttagctggtctggtattaatcgcaggtatctcttggcagattattttgccagtcgtcggtgctgttgccttgatagttgctctttttatggttgtttttttaattcctggtggtaaggaatttctctatcatcatatgggagtagatacctatcaaattaatcgtctctcagcttggctaaatccctttgattatgctggtagcattgcttaccaacaaactcaaggcatgatttcgattggtagtggtggcttatttggaaagggctttaacattgttgaacttcctgttcctgtccgtgaaagtgatatgatttttacagtcattgctgagaattttggctttattggcggcagtattgtgttggccctctatttaattcttatttatcgtatgctgcgtgtcacttttgcgtcaaacaatctgttttatacttatatttcaactggttttattatgatgattcttttccatatttttgagaacattggagcagcagttggtatcttacctttaacaggtattccgcttccttttatttcccaaggaggaagttccttgatttccaatttgattggtgttggattggtcttgtctatgtcttatcaaaatagtctcaatcaggaaaaagccacagaacgctattttgctcatatcaaaaaggagagtcttacaagttaaggctcttttcgatatactaataagcgtaaaaatagtttttagaaagcggcaataaggttgctataagcattgacaaaaagaaattggctgttataacaatacttaagaaggaaattttcgagacttttagtttaaagcttagaaaggaactgagaaacagtactgcgatgctcaatacgaaggatcaataatatttttcatactaagctaatacaaaatgcagccaatagccataacagtggtatttcgttttgccatcccgactacccaaggaaactgttaaaaaagttatgaatacaggttcttattataaccaaactctaaaaaagctcgaaatcggattgagatatgaaagcaacaaagggataaggcttggttttcttaggatcgtatctgtaaaaaaacttaaaaatatgttataatgaaaggtatggattatcatgattacatctgggatttaggcggaacattactggataactatggtatgtcaaccaaagcgtttgttgcgactttagctgattttgggcttactgcaacttataagcaggtttatgataaacttcgggagtcgacggatactgccatttcttattttgttccaaattgtccagcatttcgagaggcatataagaaaaatgaagctgtatttttagaaaagcctattctttttgcaggagctagggaagttcttgagaagattgttgctggtggagggcggaattttttggtctctcatcgcgataatcaagttttggaaattttagataaaacaaagattgcttctctttttacagaagttgttactgccagtaatggctttgccagaaaaccagatccagccagtatgctctatttaaagaaaaaatacacccttacaaatgctcttgtcattggtgatcgaaagattgatgttcaagcaggtcaggcagctggtttcgatactgttttagtagatgggtcaaagtctttgatagcaatcataaatgaaggtaaaatgaaataatgacagaagaaaataaaaatttagatcagttagcacaagagtacgatgccagtcaaattcaggttttggaaggccttgaagctgttcgtatgcgtccaggaatgtacattggttcaacttcaaaagaagggctgcatcaccttgtttgggaaattgttgataattccattgatgaagctttggcgggttttgccagtcaaattcaggtttttattgaagaagataattctattacggttattgatgatggtcgcggcattccagttgatattcagcaaaaaacaggtcgaccagctgtagaaaccgtttttactgttctccatgcaggaggaaaattcggcggtggcggttataaggtatctggaggccttcacggtgttggttcttctgtcgttaatgctctttcaacacagttggatgttcgcgtccataagaatggcaagattcattatcaagagtatcatcgcggagtggttgctgaagatttaaaagtcattggtgatacagatattactggaacgattgttcacttcacaccagatcctgagatttttacagaaacaaccgaatttgattttgataaattagccaaacgtattcaagagcttgctttcttgaataagggtttgaaaatttcaattaccgataaacgctctggacaagaaagaaaagaagaatttcactatgagggcggtattgtcagttatgtagaattcatcaatgaaaataaagaagttatttttgataaaccgatttatacggatggttctttggatggtatttctgtcgaagtagccatgcaatacacaactggttttcatgaaaatatcatgagttttgccaataatattcacactcatgaaggtggaacgcatgaacaaggattccgtacggctctgacacgtgttatcaatgattacgccaagaaaaataaaatccttaaagaaaatgaggataatttaaacggtgacgatgttcgtgagggcttgacagccatcatttcggttaagcatcccaatccgcagtttgaaggacaaaccaagaccaaactgggaaattcagaagttgttaaaattaccaatcgacttttcagcgatgctcttaatcgttttttgttagaaaacccacaaatcgctaaaaagattgttgaaaaagggatactagcatctaaagctcgtattgcggctaaaagagcgcgtgaagtgactcggaagaaatccggacttgaaatctcaaatttaccgggcaaattggcagactgttcctctaatgatcccattcagaatgaactctttatcgtggagggagattcagctggcggttctgctaagtctggccgtaaccgtgaatttcaagcaatcttgcctatccgcggtaaaattctaaatgttgaaaaagctaccatggataagattttggccaatgaagaaatcagaagtctcttcacagcaatgggaacaggttttggggcagaatttgatgtttctaaatcgcgctatcaaaaattggtgattatgactgatgctgatgttgatggggctcatattagaaccttacttttgacacttatttatcgtttcatgcgtccggtgcttgaagcaggctatgtctatatcgcgcaaccgcctatttatggtattaaggttggcagtgatattaaagaatacattcagcccggaaatgatcaagaagaaaaattgcaggaagctttagaaaagtacagtcaaggacgttcaaaaccgaccgttcagcgctataaggggcttggggaaatggatgatcatcagctttgggaaacaaccatgaatccggataatcgcttgatggcacgcgtttcattggacgatgctgctgaggctgacaagatatttgatatgcttatgggagatcgtgttgaacctcgtcgtggttttattgaagaaaatgcggtttatagtacgcttgacgtttaatcgggaatttttttgaaaagcaagtagaagtatgttataatcgtaacgttatggactactttgaataataataaagacaatttaaggagattgagatgtctagcggaattgtattgctgatagtggcaattgtattggtagtgattattgcctatcttattgctattattatcagaaaacgaaatgattcgttaatcacaaaattggaagaacgcaaacaaaatctttttgatttgcccgtcaatgatgaaattgaagaagtaaagaaactgcatttgattggtcaaagtcaaacgacctttcgtgaatggaatcaaaaatgggttgatttgtcactcaattcatttagtgatattgaaaatcatatttttgaagcagaaaaccttaatgatacctttaatttcattcgtgctcatagtcaaattaataatattgaaagccagttaaacctagcagaagaagatattaaggcaatcagagaagcgcttgctgttttgaaagagcaggaagaaaaaaacagtgctcgtgttttacatgcgcttgaaatgtatgaaagtttgcaagcttctattgaagaaggagatagcaattttggtattaccatgcctgaaatcgaaaagcagctcaaaaatattgaagctgaattctcgcaatttgtaactttaaattcatctggagatcctgttgaagcatcggaaattcttgatcgtgctgaagaacataccattgctcttgggcaaatgacggagaaaattcctgctattgtagctaaattggaagatgatttcccagatcaattggatgatttggaatcaggctaccgccgtcttttggaagaaaattatcatttccctgaaaagaatattgaggaacgttttcaagaagttcgtgaagctattggcaataactccaatgaacttgtctccctagatcttgataaggctgagtctgaaaatgaagcgattcaggaaaaaattgattctctttatgatatttttgaacgtgaaattcgtgcgcataagaatattgtcaaaagcaaaaagattatcccggcttacttggaacatgccaagaaaaataatgagcagttagaagcggaaattgagcgtctcaatcacagatatatcttaaatgaaaaagaagaactcaatgtgcgtgactttaatgaagaaatagctagtgtagaaaaagatgtcttgccgattattgagaattttgatactcaagaaaaaccattctctgttttggaagacaaatttgatcgtgctattaagaaacttgaccttgttgaagaaggtcagctggatgtttttaatagcttaaaaaacattgaaaatgttgaaaagacggcacgtcagaaattagatagctatattaatcggcttcatgccattaaacgttttatggaaaaacgcaatttgcctggtattccgcaagattttctcagtgttttctttacaacaagtgctcagttagaagccttaatggatgagttgaatcgtgctcgtattcatattgaaaccgttaatcggatgacagaagcagcgacagcagctgtagagaatttggaagaaacggcttaccgtgttgttcaaaatgcaacactgacagagcagttgctgcaatattcaaaccgttaccgcagttttgaaccaagtgttcaagaaagctttgatattgcccttaagctctttgaaactgattatgactaccaaggttcttttgatgaaatttcttattctttagagacagtagaacccggcgttactgatcgttttgtttcttcttatgaaaaaacgcgtgaaaccattcgattttaatatactgataacactggttagtctactaatcggtgttgtttttgtttttggctcattgtcaattgtagtgggtgacttattttaacattattctcaacaaaaaatgcagaaatgttttatattatattatgtggtaaaaaataaggggagaatatttgtgaatatatgaactttgaactcaatggtgtttgataattttgaagcagcagatatagctcttctttttgaatcagaaggaggcggtttgttgcttgatattactggtgctgtcgtaggtggtattgccggtggcgtttatggagctgcaactggtggagcaattagctcaatggttcttccagaaataggaactgtatcaggtgccacaattaaaggtgtaagagatggtgttgccttaggtggaacccttggattggctggtgtggctgttgatacatgggggccatggatttaaagaagggtattaaaatgcattttcctaaatttattagccttatcatgggagctataccgatactgttacttttattggttatctttccaaataataaaatgagactgttcatctatgccttactcgtgatcaatgcactggcgattatttatatctatttgaaaaataattattttaatcactaactatttgatttctctgtatagtagggggtgtagatgtagtcgagtgttggtttctgcgggagcttgtcttgggtttggtgctgcagcaatcgcagaggcttcaaatccagttggttgggtatttctgggtgctcaaggtttggcattagctgctgaaattgcatatgctcagcagtaaggaaatgaggtacggaattttggcagaaaaaacgaatcaaaaaaagatactgaaattattggctatgctgttggcttcgatggcacttgcttggctcttgtggacaatatcaaaggttttagctggttttgtatttattttaattatggcttctgctagttttcagttttcatctgaaaaacagtaggtggatcaattaataaccaagagcttgggacaatagtgccccagctcaaacaaaaaagtaacggttttgataccgttgcttttttgaataagagatagtagtaataaaatgtcattacgatgatatcataagcattatcgcccatttattggcagtcagataaaatttaaggcttgcaatattcagaattttcttgtaaaataaagaaaatagaaaagcgatgagagaaaaaaatctaagaaatgaaacagagagtatgggaagctgaaaacatacaaaaagcttaggtaacacattcttgagtgcgggtgccaaatcgtaggaaagtagtgctcgacgggttattcacgttacgaataggagtttcaaactccctgagggtagtcttggcgacaggctactgaatgaaggtggaaccacgtgtgtgtcagcgtccttgcaaattttttgcgagggcgcttttttgaatagtttgttgaggtgacatatgattagaggattacgacaaattgaaccttatgtagcaggagttcaacctgctgaaaggaagatgattaagttgaataccaatgaaaatgcttatggtgttagtcccaaagttcgtgaggctttaaccaattttgatgttgatagtttacgtaagtattcgacgcttgaacagactgatttgcgagctgccttggctaacaatttaaaggttaagcctgaacagttgataattgctaatggttcagatgatgttttatctatcgctttcttggcctttttcaataatgatgaacccgtccttttcccagatttaacgtatggtttttataaggtttgggcagatctttatcgggttaactatcatgaaattcctttagctgaggatttcaccataaacacagaagactatttagctgataatggcgggattatcttgaccaatcctaatgcccctactggcatttacaagcctctgaatgaaattgaaaagcttctcaaagccaatcaagataccgtagtcattattgatgaggcttatatcagttttggcggtcaatcggctctttccttattaaataagtataataatcttgttattacacgtaccttttctaaggatgcggctttagcaggtttgcgcgttggttatgccattgccaatgagcctttgattgctgttatgaatgctgttaaacattccatcaatccttattctgttgatttgttggctgaaaggttggcgacggcagccgttgaagactggtcctattatcaggaaaatgctaaaaagattcaaaagacccgagcttggttttctgagcagttagtcaaacaaggttttgatgttttgcctagtcaagcaaattttgtcttgacaaaaccccatgatcttgcgacagcaaagctatttgaagaattagaagccagaaaaatttatgtccgctattttccaaaagtcgaacggattaaagattatttgcggatttcgatggggacacaagaggaaatggaagaggtcgttaaggccattgaggaaataagaggatgaagaaaacaagtttaccagttggcatgcacgataagctctttaagcgagcacgtgtcatgtatgagattgagcgagatattagtaatcttttaattaaacaaggttttaatcgcattgagacgcctactttggaacattttgaagtttttgcggatgacgtttcttctgagcattaccacctttttgataagaaaggaaatctcctcagtctgcgtcccgacattaccagccaaatcggtcgtgtcattgcttcgacacgtgttgaaacaccgattaagttctcctattcgggcaaggttttcaagtataatgaggagctgcgcggtttggccaatgagcacacacaagcaggtattgaaattgttggctacaagactcaagatgccattaaagatgctctgctttcagctaaagatgctttgaaagccagtggtttaaaagattataaatttgaattttctcatgcacatatcttgcagaccatttttgcaaatttagacattcctgaaactgctaagaaagatttggccactttcattcaagataaaaatgtcacaggtcttaacgaatttacccatcgttaccctagtgaatttgatgccttgataagacagcttccttttctttttggggagagtcatcaggtcttgaaaaaagctcgccagttaactaatcatcagacaatcttatcagccctgactgatttggaagacttgttgcaagaactggcggtttcattggcagagattactttggatttggcacaaattgctagtatgccttattatacgggacttatgttcaaggtatttggcgataagattccagatgcttttgtatcaggtggtcgctatgataagctgtttgagcgttttggtgctaaagaattaacagccatcggttgggcacttgatattgatagtgtttatcaggctatccatgatcacattcgcttttaggagggaattatgacaaaacaattaaccattgccttgacaaaagggcgaattgaaaaggatacggtcaaattacttgaaagagcgggttttgacatgtctttcatggctgataagggccgtaatctgatttttgaaagtccagataaaagctttcgttttctgcttgttaaggcaccagatgtcacaacctatgttcgtcatggtgtagctgatattggtgttgtgggaaaagatgttctgattgaacatccgacgggttacttggaaatgctggatctcaattttggactttgcaaattttcagtagcctccacaccagattataatcctagtgatcataaacgcaagcggattgcaaccaaatatccaacagttgccagagactttttcaatcaaaaaggggaggatgttgaaattatttctattcaaggaagtgtggaaattgcccctgttattggtttagcggatgccattgtcgatattgttgagacaggcaatacactagtcgctaatggcttggaagtctttgaagatatttgtcgtatttcagctcgcatgattgtcaataaggccagtttgaaaaataaaccagaattattggctttcatcaagaaaatggaagaccttgtcggtgatagagaggtggcttttaaatgaaacgtttaacaggaacaaatgaagagatttctaacattttatatcaagagcagctggaactcagcaaggaaaatttagatgttgaagcgactgttcgtgagattatcgaaaaagtcaaagaagaaggtgatgaggctttacgagcttattctgaaaaatttgatcatgttgtattatccgaattgcacgtttcggatcaagttgtcaatgaagcttttgacaagattgataaagatgttctcacagcacttgaaaatgcaaaagctaatattgaatcctaccataagcaacaattagaaggaggttttgaagatcagctctctcaaggggtgcttcgcggacagctgattcgtcccattgagcgcgttggtgtctatgttcccggtggaacagcagcttatccatcatctgtactcatgaatgttattccagctaaaattgctggtgtgaaagaaatcattatgattacaccgccgcaggaacattttgtcccagctattttggttgctgccaaactggccggtgttgataaaatttatcaggttggcggtgcccaaggaattgcagctttggcttatggcacacaaacactgcctaaagtggataagattacaggcccgggcaatatctttgtagcaactgctaaaaagttggtttatggtgtggtaggcattgatatgattgctggaccatcggaaattggtgtcatcgcagatagtacagccaatcctgtttatgtggctgctgatttgctgtctcaagcagaacatgatgtacgtgcccgtgctattctcgtgactaactcagctgaattggctgatgcggttgaattagaaattgaaaagcagttgcaaaccttgccacgtcaggctatcgctcgtccttcaattgaaaataatggtcgaattattattgcccaagatgtggagagcatgtttgaactcatgaatttagtggcgccagagcacttagaaattgctatagataaagcttatgattatttggaacgagtgcaaaatgctggttcgattttccttggacattacaccagtgaaccaattggtgattattatgctggtgccaaccatgtgctgccgacaacagctaccagtcgtttttcatcagcacttggtgtgcatgactttgtcaaacgcatccaatacacgcaatacagtaaggctgccgttaatgcagctgaaaaagacattacaacccttgcctatgccgaaggtttgcaggcacatgccagagcaattgaggtgagaaatgacaaaaactaagggtcttttggtcatggatgttgactctacccttgttcaggaagaagtcattgatcttcttggagatgaggctggagttggtcagcaagttgccgatattaccgagcgggccatgcgaggggagttggactttcgtcaggcacttgaggagcgtgtggcaaccttggaaggattatcagaatctatttttgacaaggtttatgcccgcattcatttcaataaaaatgccaaggaattggtggcggaattgcatgcgcgtggttacaaagtcggtctggtttcaggtggctttcatgagacagtcgacagattagcagcagaagctggcattgattatgttaaggctaaccatttagaagttgttgatggtgtcctgactggcaaaacatacggagatattgtgaccaaggaaatcaaagtacaaaagctccgcgattgggcagcagaaaatgaacttgtcctttcacaaaccattgccatgggtgatggtgccaatgacttgcccatgattcatgaggcaggaatcggtattgccttttgtgccaaaccaattgtccgccaacaagcaccctaccaaatcaatgaaccagatttgtacaaagtgattgaaatattagatgaggtgaaaaaatgagacaagcaaaaatcgaacgcaatacctttgaaaccaagattaagctgagtttgaatttagatacacaggaacctgtggacattcagacaggcgtgggcttttttgaccatatgctaaccctttttgctcgtcatggacggatgtccttggtggttaaggctgatggcgatttgcatgtggatagtcatcatacggtggaagatgtcggtattgctcttggtcaagccctgcgccaagccttgggagataaggtaggtattaaccgttatgggacaagttttgtgcccatggacgaaaccttgggcatggccagccttgacctgtccggccgttcttatttggtttttgatgcggaatttgacaatccgaaattaggtaattttgatactgaattggtagaagaattcttccaagctcttgcttttaatgttcaaatgaatctgcatttaaagattttgcatggtaagaacaaccaccacaaggcagaaagtctctttaaagcaactggccgtgcgcttcgtgaagcagtgaccatcaatccagaaattaagggcgttaattctacaaaagggatgctttaagataaggtgaattccgtgagaaaaattttttcaagtttgacacttctttttcgttttgtcttggagatttcggcaataattggtttagccgcagcagcattttgtgagtatagtctggtagtcagagttttatatcctttcttgggactgattattgctctcatttggtctcgctatggtgctccgaagtctaccaatagcctgaagggaagagctaaattcgctctggaatgtttcgtctacggtctgaccattttctgttttgcgatgatttatgatcaaacttttactcttatttttgcgctgatagtagtcattgatttaactgctatgtatgctttggatttagagagaaaggagaccttatgattatagttattgattacgacgcaggcaataccgctaatgtcctgcgggctttggataaacttggtgtcaaggcagaactatcagtggatccgcaaaagattgtggcagcttcaggtttgattttgccgggagttggtgcctttccggctgccatggctgaacttgaaaaaagaggccttgtgactgttatcaaagaagctgttgccaaaggaataccccttttaggcatttgtctgggtatgcaattattagtggaaaaaggtttggaacactgtgagacagctggttttggctttatttctggtatttgtcgagaaatttcagctaaagctggttttcctgttccccatatgggctggaatgatttgcaggtcaagcagaagtcagctttgacagccggtttgcaaggtcaggctgtctatttcgtgcatagctactttacagatgtcccccaagaatacattgatgtgacagttgactattctattgaagtaccagccatgattcacaaggataatgtctacggcgctcagttccaccctgaaaaatcgggtgatgtcggactaggtattctcaaaaaatttgtggatttgtgtgactgatggaaataaaattagaaaggacggttcatttaaacattttttgaaccgaacccgagctaaataacggaataattaagttatttcttgttagataattaagaaagagaaaggaaatgagttcgagctaaaagctcgcttacttgactaaactatatagaaaggaaagttcagttagatttttcgaactgaacccgagctaaaagcatcgagaaaaagataaacttcctagtgacaaagtcacgtcgtcagtttcctattttcttcttgctttcttaacgctcttggtatcttaattatgcaaattcttccagctatcgatattaaaaacggtcatgctgtccgccttgtcaagggggattttgagcaagagacggttgttaatgataatgttctcgaccaagctagtattttcatggaagcaggtatccaatacatccatgttgtcgatttggatggtgcacttgaaggtcgggctgctaatcgtgatttaattgccaagattaaagaaatgacaggcttggcgattgaagtcggcggtggtattcgcaccattgaacaaattgaagattatttatctgtcggtattaatcgtgtgattattggctctatggcagttaagcatccccaatttgtcaaggaagctctggataaatttggcagcgataaaattgttgttggtattgatgctaaaaatgggatggtagctacagaaggttggctggagactagcaccgttgattacatcagcctagccttggaaatggaaaaaatgggtgtcagactttttgtctatactgacgttgaccgtgatggcacattgacaggccccaattttgagcattatgagaaactaattgctcacttgacaagtgccaaggttattgcctcaggtggtatccatgccctgtcagatttgcaacaattagaaaagattggtgttgccggaaccattgtcggcaaagcttattataatggcgatattagtctaaaagaattaagagaatttgagggttagccatgttaaaaaaacggattattccttgcctagatgtcaaggatggacgcgtcgttaagggtgttaattttgttaatctgactgatgttggtgatcctgttgatgctgcgcgtgcttattatgaagcgggttgtgatgaactggtctttttagatattacagcaacctcggacaatcgagaaacgacagtggatatggtaaggcatgtagcggaccaagtctttattccctttactgttggcggtggtattcgttcagttgatgatatgaataagatgctcaaggctggtgccgataaggtcgctgttaattcatcggctatcgccaatccccagttaatcaaggattgtgctgagaaatttggcagccaatgtgtggtcgttgccattgatgcgcgcaaagaagcagatgattcttggcatgtttacgttgcaggtggccgaaaagatacaggcattgatctcttatcttgggttaaagaagccgttcagctgggtgctggcgaaattctcctaacaagcatggataaggacggcaccaagtctggttttgacttagatatgttaaatgccgttgcccagttggctgatattcccatcattgcctcaggtggtgccggaaatatggagcatatggtggaaatttttgaaaagaccccagcaacaggtgccttagcagcatccattttccattatggcgaggtttctatcgcagatactaaaaaagccatgaaagagcatggaatcgaggtgagataatgaccgatttatcactagattttaaaaaacaaggtggcctattaccagttattgtgacagactttcagacgggacaagttctcatgctggcttatatgaatgaagaagcttatcaaaagaccttagacagtaaagaaatgtattactggagccgctctcgcaatgaactctggcataagggagataccagtgggcattatcagtatgtcaagtccatcaagacagattgtgaccaagacaccctcctcattgccgtagaacaagtcggcgctgcctgccatacaggagcttattcttgtttttttaatgagatttacaatcctgagtaggactagaaaagcatttatagaaaggaatagatcggtctgaaagtttgaaatttaattagttatttccttaaaagaagaaggatatatcaaagcaaagggggagaaaattgagaatgagatttgctaggattataaaatctgtttggaattgtatgcaacgtttaatagtacttttaccaatgttgactgtaatttctttacttattttaggaagtttattattcttagtttctttgattccatcattacttcttaaaggtagagatatagttgaattttttataataattatattgctagtatattttgtgcatctactaagaaatcaattattgattagatatggaatattatatacaattttaaccatatcaagtgtttcaatattttgcttacctcaatataggtcaatcatattattgcagccgactattttatttatttatgctatatatcaagaatcaagattgattcagattaagaacttttttgaaaaaaataaaagtgtattaacatggtttaatatatttgatgcaatttatcttttggcttttctttatagaaaaaatttagataaaacttacgtaataaataagatttggagcatttttaatgatttacatttaccattactattgacatctattggactcttggtaatcgttccaatgctcattcgtacagtaattgcaattactatatataagaaacaatatcatattgaagttccacctaataaaactttaggaatggtttggttatcaaattgtatttgctctttttctcaactatttatcataatagcacttgttgaacaaataaaaactgttcaatttgaaagtattgctttaacattttgctttatctcatttttgagtgttcttttttggaatgtatcctatgagtcattgaaagataatggtgatgataaaactgaattaatgttaagattaactgcaatatcttttgtttttatcataattgctttactaagtcaaaaagagaatgaaacaattagtattttaatgtggttgctacctattgtaattccaatgtttattggtgggttaggtaaattagaaccacaatttgtctcaactcaaaaactagatcgtcatgtgtatcagttgacgatgtttagttttaatacgttactgatttatagacttcaatctgtctgttccgttgaaattaatgagaatcaatatacattaaaatcgttaatagtttatgtattaaaagataaatttgaacaagataattctggtttcgttgcaacattaattttattattgctatcattaggggcaggatatgaattaagtaaatttttaatattattattgaaaagagtatatttaaactcagacaatggctattttataaaaaaaggagaaaaaaacaatgctagaaacactttacaaagaagcgctagatcgcaaagaaaaccctaaggaaggctcttataccaattatctttttgataagggattggacaagattcttaaaaaagttggtgaagaagctactgaagtagttatcggtgccaaaaatgctgacaagattgagattgcgagtgagacagccgaccttctttatcatttggctgtcatgctggttgagactggcgtaacactagccgatgtcgaagccgttctcaagtctcgccaaggtaaacaaagtaatgttcatgatcgcaaagagattacggattattagggagtagcaaaaatgataacggcagaagacattgtagaaaaacagttttctgccacgtttcgaggttataatcaggaagaagttgatgagtttcttgatgacattacagaagctttgaagaccctagaaaaagaaaatcaatcctttaaacggcaagtgaaaagactgaaagaagaccagcgggatttataaatcattcaaaaagctgccaaacatttttgacagcttttttgatagtattaaaattaatctacgaaaatatagtgatacagttgcacgatcttttgaaatgcctctgtatctaattatccaaccttttggatgtttcttgccctataatcaaaggtatggagttgaaaaggattaacgaacccatcaatagttggatgactaaggtcaaccagaagattttgcgcttcaagtttttcctgcccatgggtaatgggacaaacagcaacaaacccagtctgcctagcataagcctgactggaaataacaagagcaggacgtcgtttttgaatttccctatcagctgataggtcaaaatcaagccaaactaaatcttgtttttgaggaatataattcttactcattatccaacaaagtcactccttcaaaatcgtttgtcattctcaaacctatctttttaacttctatcaaatatggtaaaataagattacaattttaaatcaaaataagaagcgaggctagcctcctttgttatattcataacaaaggaaacctaacagtctcttgctttttaaagaaaagtgaaatatgagtaggaaattaataaaaagtaaggaacgtgtccaaaaacatggagaggtttttactcctagctgggtcgttaatttgatgttagatcaagttaaaagacaaactgataatatctatgcaactttcctagagcctgcagcaggagaaggtgcatttttaacagctattttagaaagaaaattggaaagtgttaccaagcaatatgataaacggtattggaaaacgaagtcattatttgctttagcttctatttatggaattgagttactggacgataatctctattatgcaaggaaaaatcttttagatacattcatcacttttcacaaaaatcagaaccataatatcggtaaatcaaccaatttatataaagcagctcgttttatcattcaaaagaatattgtttggggaaatactctaatgagactccgaccgaatggagaagttatcacattttctgagtggagaagagtaaagggcttcccatcgcaagttgagcgtatgcctttcacctattctagcttatttgaagacaaatctgatgatgatcagtttgatttatttgaagtagaaggacaactaaatttatttgaagataagcatgttggcgaagctaaaaaatataaaattgtggatatgttacatgtatttaaagaggagatggagtaatgaaaaagacagaaattaggacaactcgggttctccacccacaaatttatgcttggtatacaccggatatacccaatataaaaattgggtaaaaatcggttatacgactagaacagctgaacaaagaattaaagaacaggctagtcaaatcatcattgataaaaaagaattgtggcactatgatgctcgatttatgaatggacagggatattttgatgatcatgatctacatgattacttgactagaattaaacaaattcctcgggaaaaaggttcagaatggtttgactatacacctgatatgacacagtcagaaagagattttcaggattttgtttttcagcgttatgatgtcagtaaaacaatttcagaacaggattaccagcttagaaatgagcaaacagaagcagtttttcaggcgaagtcctattttgataaaggtgggaaagaatttctttggaatgctaagccccgatttggtaagacactagcagcctatgatttggtgcgtaaacttgatgctgtaaatattttgattgtgacaaatcgtccagctatcgctaattcttggtttgatgactatgaaaaattcatcagatggcaaacaagttatttatttgttagtgaaacagatgctttaaaagatcgacctacgctgagccgtaatgaatttgtatcaatggtacaagctcatcctgattgcaatcagattgcttttatatcgttgcaggatttaaaggggtctaagtattttggtgatggtccatatgataagcttaaatgggtagcagatacaagttgggatttgttggttattgatgaggctcatgaaggaattgataccttcaaaacagacaaagcttttaaccgtttgactcgcaaatggactttacatctttctggaaccccttttaaagctttggcttcagataaattcacagaagagcaggtctatacttggtcttatgaggatgaacaggcagctaagaatagttggtcagaggataggaacaatccatatgaagacttgccaactcttaacctttttacctatcagttatcgcaaatgatgacggataaggtcaaccaagggacgcaagtggatgatgaagaacttccttattattttgatctgaatgagttttttgcggtcaatgagagcggtaaatttatctatgaggcagatgttatcaggtttttagatatcctaacccacaatgaaaaatatcctttttcgactcctgaactgcgttatgaactcaaacatactttttggttgctgaatcgtgtcgcttcagccagagcattggctaagctgctcaaaaatcatccagtctttcaagattatgaagtcgtcatcgccgcaggaaatggtaaggaggataatgaagccgaggatgtacaagccaacgaagctagcttagcgcgtgttttaaaagctatcgaagaaaataataagaccatcaccttgtctgtaggtcagctgacgacaggcattaccgttaaaccgtggacggcagtactaatgctttctaatattaaatctccttctatttatatgcaggcagcttttcgggcgcaaaatgcctatagttttgaagatgaagagggaaatctaaaacgtaaagaaaacgcttatgtctttgattttgcaccagaacgtactttgattctttttgatgaatttgccaataatcttaagaaatcaacagctaatggtgctgggactagtcaagaacgtaaggcaaatatccaaactcttctcaactttctgcctgtggttggtgaagacactgaaggtaagatgattgaattggatgcagaaaaagtcctaactattccacataagctcaaagctactgaggtagttcgtcatggctttatgagtaattttctctttgccaatatttcttcaatctttcaagctccatctattgttcaagaaactttaaataagcttgagccagctaaggaaggtaaaaagaaaagcaaaataattgatacgagtaccatagagacggatgaaaatggtgatattcaagtatctgataagattgtaatcaataaaacagaggcgatctttggggacgaaaaagttgtagaagtaactaacgatcttcgtaccaatattgagacaatagacatagactctgcggaaaagtttattaatcaggtaactgatacggccgttaagacgatacggccagatttagagactgtcgaagaacagtttgaaaatgtccataaatcagatattgaccgtatgcaaaagacaatgcaaaattatgttgagcaagaggtgaaagaaaaatatctgtctttcgatcataagcaggctgaaattaagcgaaattatgagggtaaattaaacgaagctgtgacaaaacaagaaaaggcggacattctggtggctgaggagttggatttatccactgctttgcaagatttacagacggagctgatgtcaaatctcccagagacaatcgctaaagcccaagaagcagcagtgaaagagcaagaagtgcgtcaggttgagcgcaaaaaggccagcattgagggagatgttcgtgaacatctgcgcggtttttcccgcactattccaagttttatcatggcttatggagatgaagatctgaccttagcaaactttgatgcctatacaccagataatgtttttgaggaagtgacaggtattacagaagaccagttccgttttctgagagatggtggtgattatagagacgaggagacaggggaaattaaacattatgatggacatctctttgatgaaattgtctttaatcagtctattcaagagtttttgattctcaagaccaagctggccaactactttgatgacagtcagacagaggatatttttaactatatccctttgcaaaagaccaatcagaagtttacaccacgcaaatatgtcaagctgatggttgatagtctagaagctgaaaatcctgatatttttgaagatttaaatcggacattttttgatccttatgtgaagtcaggactttatctgactgaggtggctaaaaaactctatcatagtcatacccacaagacagcctttcctgacgggcaagaaaggattaagcatattttagaaaatcaagtttttggtgcagctccaactgagattatctatcatattgctaaaacgtttgtctatggtcagtttgatcatattgacacccgcaatctaaaacagctagacttagtacctgcagccaaaaacggaaccatgcaggatacagtcgctcaagcctttggaggagaaaagaaatgacagaaccatttaaatttgatgtagtgattgggaatccgccgtatcaagataatgcattaggagataatacaacttatgcaccacctatttatcatgaatttatggaagaagcttataaattgtctgataaagtctcttttatcactccagcccgcttccttttcaatgcgggcagcacccctaaggcatggaataagaaaatgctttcggatgaaaatcttaaagttacctactttgagcctgatagttctaaagtatttcagaatactgatataaagggtggtattgccattacataccgtgatacaacaaaaaaatttggtgccatagatacttttacttcttttgaagagcttaatcatattctacataaagtgtcagtagtaggtgaagataccttagatacctttattagtggtcgtggtgtttataaattatctcaaatagctttagatgaatatcctgaaattgagattattcaatctaaaggacataaatttgatattggttcaggagcttttaaaatcttaaagaatttactattttttgaaaagaaaccaatagatggaggaaattacacccaatttttaggtttatctaatttaaaaagagtatattactggattgacaagaaatatatcaatccaccaaaaagcttttataagtataaagtgtttattccacaggcaaatggaagtggagccataggagaagtgctttctacacccctaatcggggaacccctaatcggggctacagaaacttttctttctattggagcatatgaaacatactatgaagctgaagcaacattaaaatatgtaaaaacaaagtttgctcgaaccatgcttggaattttaaaaattacacaagcaaatactagagataaatgggcaaaagtcccccttcaagatttcactcctaattctgatattgactggagcaagtctatttcagagattgaccaacagctttacaaaaagtacggtttctctaaagatgaaattgattttattgaggaaaaggttaaagcgatggaataggtgatttcatctaatcatacttagagattgaaaaaatcttacttcaaaagaagtgagatttttcttttaactagtgataactagaccatgtatttgtggtataataacggtacattatgctcaggagaatattttatgaatgatgttatacaaaaggttaggattggttgcttaaattttcaagatcctttttttgattcattgagacatgattatgatggatttgataattggctatatcgtaaatccaatgaagaagcttatgtattaatcaatcaagatcaattacttggttttctttatctcaaggatgaatgtgaggcagacagcaatatcaatccgttttttgatgaaagacgccgcttaaaaattggcacatttaaaattgattcgcatggtaccattcttggtcaacgttttttaagcattattctaagaaagatgcttaatgaagggtataatttcacctacgttacgctttttccaaaacaaacaggtttgattgctctttttgaaaaatttggttttcaaaaatggggaagcaagtcaaatggtgagctggtttattttaaagatttattagtttttgataacacttataaggattttccaagaattaatttattgaaaggtaaccgaaagcatttattgggaattcatcctgattttcacacaaaactatttccatattctagattacatacagagcgtaatcatatagtggaagatctatcatttacaaatacaagtgaaaaagtgtatttgacaaaaatgtctggcgttaaaaatatgttgccgggggatttaatagttatatatcgtacctctgaagctggaaagcctgcagagtataattctgttgcaacatcaatttgtacggtcgtagaagtaattgatatatctaatttcagatcgttagatgatttccttcaatattgtggaaaaggtacaatctttacacaagaaaaattagttggtttttggaataacaaacgttatccatatattattaagatgttatataacgcacctttacagaaacgaattattagaaaagatttgattgaacgaattggacttgatagaaataattactttggatatctgactttgacagacaaacaattttacaatattttagaaataggtgaaataaatgaaagctttattatcaattaagccggaatttgtagcagaaataatagaaggaagaaaaaagtttgaatatcgaaaaaaagtattcaaacgttcagacgtatcttccatagtcgtttatgccactaagccatacggtaagatagtgggagaatttgagattgcagaaatcatagaagaaaatttggatgcgctttgggaggaaacgaagaagttttctggaatctctgaagaattcttttatgattatttcaaaaatagagagagtggatttgcaattcaaattaaagacttcattgaatatgatgaacacttagaactgtcggagtttgattctaatattaaggttgctccgcaatcattttgttatttaggaggatattgatttgcattacaccttgttagttggtgtccatggtgttggtaagaccactttgcttaacaatttaaaagaagatattaagctgactgctttatcaatcagtgatttgattaggcaagcaggtaataatataaaatctaatgataaatttacaagaaatgtgatgaataatcaggaattatggaagcaagagttgaaagaatactactttaatgaagatgatattgttattttagatggacatttcacacttttagatactaatcgagaaattgtagaacttccattctccatttttgataatcttccaaccactaaaattgtgataaaactagaatctcctaatattattcaagagcgattagaaaaacgggataagcaaaattggaataagaaactaatttctgattttcaagatagagaaagagaaagggcgctggaattttctaatttaaaaaatatcccaattttcatttataatgataatgaacaatttagtgagctaaaacaatttattattcaaaattaggtcgataaaagaatatcatttgatcattatcaccaaatgcaacagcatatcagacttatctgataatgccaccgccaaagaatttaaaactgtcctgacctatattgccaaggaagccaataaggctcagaggaaattagttggtttagacgtagaataaaagagggaaattcaaggatagtaaactgtctttggactcaaatagctgaagattgatacctcgaatcaatcgctgtatgacttaagcagcgtcataatatagataggattaggctaggaagtatacgataccctagccgtttttgatacatttgtataaatgggggttgaagattatccttaggaggaaggagtactgctatactaaataaaaaacacaatattacggctatagctgcatcatctgctgctgtccgtatcatccaaggaaagtttcaaaagaaagctttgttttaaaaataagcactatttaataaaaatagtgctttttcttgaactgataattaaaaaatgttaaactaataatagtaaatctagcaagggagttgtaaatctattgtcggcacaggaatattcagagcaagaaattaaagatgttttaaatcagattaagttcttggtgtcaaaaaatagatttattatcagtactggcgaaaatagacaaaagaatgatgaatttgcagatgagttcaatctggatactagtaaacgaaagaaacttatcttaaagatagaagttcatgacttttgtgattgtgttcagtcaccaaatccttatcgtaatcatgatgattattttatctttgggcctcaattcactttggaagattttttaggtgataaaagaagtgtacaggtttatgcaaaatttgtactagctgctagtcagacttctggtctaaaaacaattgttgtttcctttcatgaagctgaaaggccgctgagttattatttttaataataataaaggagttgaatgtatcatggcagaaaaaagaattttttgtgaacattgcttggacgatgttgcttatcatattgaaaatcgcgagttgacacgaaaattaaaaggaaaaaattatactttcaagggtcaggaagctatttgtgataattgtaaaaatcctgtttttgttacaaaaattgatagtagcaatagacaggccctttatgcttcttttaaaagggaaaataatattatttctgtttctgagattgaagctgttcttaaaaaatataatattggagccaagcctttgtcagagcttttaggctggggtattaatactatccctagatatttaaagggtgatattccaaaaccagcttattctgatttacttagaaagattgctgtggaacctgcttattttttatcacttttaaaaagcggttctgatattttaaaacctgttgcttatgagaaaagtttagcagcagcagaacagctgctaaaggagacaaaaattgataaagaagttttagtgtcttactatttgttatcaaaaaatgatgaaataacaccactagccttgcaaaaattactttactatactcaaggtttttcctacatttttataggggaatttatgtttgcaagtgattgtgaaagctgggtgcatggtcctgtgtacagggatatttataatcaatttcaagagtttggcagagaaccaattgttcttgatagaacttatgatatcagctcttgttttacatcacaggagatattgcttctggacagcattgtccaacatctgagtgtgtataatggtaaggtattggagaaatttactcatgaagaaagcccatggttatcagcgcggagggatttaaaagaagacgaaccgtctaataagattattgataagaatagcattgctgattttttcacaagagtaaaggagaagtatgatatgctcacagtggatgatttgtcggcctatacaaaagcaagatttgacaatcttagcttttgatgtatagtaaaaccgcttttttagcttatcgaagttagaaaagcggttttatttttttattgatatgcttttgcttttaggataaaagtatttttcttaaatctgctaccgttttggccatatccttcgcacctgctttttctaattcctcttggctgccaaagccataaaggacagcgatagtctctagattattttctctggcacctataatgtcgtgtttgcgatcaccaatcatgacagctgatgaacgatcagaaatctgcgcagctgctagtccataggcaatgatatctcctttttgacgtcttataccatccatgctggcacttgctatgaagtcaaaattattatagaggtcaaaatgcttcaagatttgtctggcaaattcttcaggctttgaggttgccactaatagcttttttccttgagccttcaatctttccaataaatcaggaatgccttgataaacctcattttcataaagcccccttatggcggaaatagtctctgtaaaaatccacagctttaaggctatcttcctttgaaaaatggtagaagttttcaaaagaatcttgtaagggtgggccgatgaaacggtaaagttccttcttatcagtcacttcaatgttaaatttctctagagcataagcaagagagttggtgattcctaaagcaggattggtcagagttccgtctaaatcaaaaagaatggtttgatacatggttttacctcattaaattagtatagcacaaaaaatgcattaaaaatggctgttttattgtataatgaaagaaaaaggagtagcggtgatgatcgttcatttttcagaaacaagtgaagagttaacatctttttttaatcagatttttgaagaacaatatgttcagtactttcaagaagcaaaacctaaaaatcagaaaaaacaagtacagtttgtggtcaaagatgatgctgcgcgcattttggcagcagcttcttgtcagcaactttaccaaacgctgaagattgaaaatttggcagtggacagtgtctttcaaaagcaaaaatttggcagtcagttattggattatatcaaagactatgcgcgtgctcataacattttgactctgaccttaagcacgcgctcttatcaggctaaggatttttatctcaagcagggttttcatatctatggccagttagcagatgtgccttttgagggtgtgacgacttattattttgtctataagttataaggaggtggccatgcatattcttattgcaccagattcttttaaagagtctttatcagctctggaagtagcacaggctcttcaaaagggattctctaaatccttgcctcaagcaacttttgatctattgcccgttggtgatggtggcgaaggaaccttggaagctttggctttgggtttacagctaacaaaagcaagtcaaacggtttcaggaccttttggagatcctattgaggttcagtatgcctacaaggatgacttggcagtttttgaaattgcggccattacaggtttggaacacattcctaaagacaagagaaatcctttgataattagtaatcgtggtattggtgaattgcttgtctttctcgctcaaaaagggattagaagagttatggtcggtgttggcggcagttctagcaatgatggtggtctaggcttagtagctggtctgggttatgctttttttgatgataggggagaaaaagttgaagccattggggccaatttgggtaaaattgttagcttttcggatcaggctgttcctgcttgtttgagagatttggatgtgacgattattacagatgtgacgaattgtctgtgtggtccgcaaggggcaacttatacttttgctggtcaaaaaggattggcagaaacggaatttgcagcagttgatcaagcaatgcgccgtttctatgagcttgtcaatccagctattttggagcttcaaggagcaggagcaggtggtggtttggcagctggtttggtcacctttgcagctggaaaaattgtctcaggcattgatgcggttttagatattttagattttgagcagcatgttcaaaaggcagatctggtaattgtcggtgaaggacgtatggataagcagagtttatcaggtaaggcgccagtcggtgtagctagacgcacgccgagtaaaacgccagtcatttctatttgtggtagtctcaaggatgatcttcctgattttccagttgcgcatattgcagcagcctttcctatcatttcaagggttgattccttggaaaatacgctagcgcaggctagccaaaatctggagagaacagcacaaaatattggtaatcttttaagcttagatttataaaaaaacaagcaataataccagtttcttctgcttagtttttaaaactaaggcaaatgagctgagacttgcttgtttttaattattggaaccatttttgccaaaaggtttttttatgtggctgtccagtttctttgccgtttgtgaagagttggggataaagagccttaatatctggattatcaatgttttcagctttgtcagtatgtactaggagtccaaaaggtgaatcgctcttatcttcggaaacaatagtagctatcagaccagcttcttgtgtttttttcatgtatagcatctgattggtcagggataattttggtgaaattttaagagaaagagaatcatattttgccttaagatcctgtagaacctgatcaaaatttgcaaggatagcttgattttctgcatccgctaagagaatgcttaaaacgaggcgttcagcaaaagtaccgaaatattttctttgctcatcgggatttaaacgatgctcaccatgggcactttctaaaatcttcttatctaaatcagtcatcttttcttcactttctacgtttattagcttttaaaaaaattatacactattttaaaaaagaaagcttaaaatgctaaatgttatttgcttttttaggtgctttagtgttataataccaagcaataactaaatgtttggggagtagaagatggaaaataaaaccaatgtttggcaggttctaggaattatctttatcgttttaactgctattttctttatctccacagcaacactgacgactttatatgttttgtccaatcacgatgttcatcagttagttgaaaaatctgaagataaagaagacaaaattgttcattatcgcaagagaattagaaaatataaggaaaaagaagtcgaagattataaaaatagttacagttatgatgactatgattcctctagtagctatgatgattaagcagaaaaagaagtcaggaaatatttaggagtaaaaaatggaaaataaaaccaatgtttggaaagtccttggcattatttttatagtgacagccagtatctttttcattgctacgattgttatgacggctttgtatgcgacatcaagacaggattttaataagtggacagcgacaaatagcatgcaagatcggaccattactaataagaaaaaggccataaaaaatcttaaaattcgagaaaaaattagagataattattatggtgatgactatgagtctactgacaaggtgaccaaatatatttttggagagagtgctaaaatgagtacaggagaagaagtcacggtaacaggagtcaaagaagattctaaggtcaagatgaaaggtgtttctaaaaaggataagaagatcgtccttactgttagtgttaagaatacgactgataaaatgatccaatttagtccggatgatttctttatctatgatagaaactatgatattgctgagccaagtaattatacaggtaagcaaaaaattcctgatattattgaagcaggaaagacaattgaggttaagctttattatactattcccaagtcttctccttatatagtaaactttgaaaatgcttactggataccacaaacacagacgcaaaagaaatcaaggactgtctaattaaattaaatagaaatagaaataaaaaatcaaaaacaaggattgtgagctcatacaagattgtttcaaaccttgctttgatttttctttttgttgtaagaaagttaggacgaagtttcgtttcaatatacattaagcatagtaagttagcacattagagattatttcattccgtgagctctgttcgtatcactttttgatcgatttatgcgaaagactgggagtgaaacggtttgtttgtaagagcgttctgtattgaacgcctagaaatgagagagaagaacccccgttcttaagaaatagcgattgtttcccactctcaaatcttttttggtttgcctaagttccaactttgtggtatgattaacatgtaaaaattaaaactcataaggagagaacaaatgtcaattattactgatgtttacgctcgcgaagtccttgactcacgcggtaacccaacacttgaagtagaagtttacactgaatcaggtgcattcggacgtggtatggttccttcaggagcttctactggtgaacacgaagcagttgaacttcgcgatggagataaatcacgttatggtggtcttggtactcaaaaagctgttgataatgtaaacaatattattgctgaagcacttattggatatgatgttcgtgatcaacaagctattgataaagcaatgatcgcacttgacggtactccaaacaaaggtaaacttggtgctaatgctattcttggtgtttctattgctgtagctcgtgctgctgctgatttccttgaaattccactttacagctaccttggtggatttaacactaaagttctgccaactccaatgatgaacatcatcaacggtggttctcactcagatgctccaatcgctttccaagaatttatgattgtacctgctggtgcacctacattcaaagaagctcttcgttggggtgctgaaatcttccatgcacttaagaaaattcttaaggaacgcggacttgaaacggctgttggtgacgaaggtggattcgctcctaagtttgatggaactgaagacgctgtagaaacaattatcaaagctattgaaacagctggttacaaaccaggtgaagaagtcttccttggatttgactgtgcgtcatcagaattctacgataatggtgtttatgactacactaaattcgaaggtgaaaaaggtgctaagcgttcagctgcagaacaaattgattatattgaagaattggttaacaaatacccaattatcacaattgaagatgctatggacgaaaatgactgggatggctggaaagcattgactgctcgccttggtgaccgtgtacaattggttggtgacgacttcttcgttacaaatacggactaccttgctcgtggtatcaaagaaggtgctgcaaactcaatccttatcaaagttaaccaaatcggtactttgactgaaacatttgaagctattgaaatggctaaagaagctggttatactgccgttgtatcacaccgttcaggtgaaactgaagattcaacaatcgctgatatttcagttgcaaccaacgctggacaaatcaagactggttcattgtcacgtacagatcgtattgctaaatacaaccaattgcttcgtatcgaagatcaacttggtgaagtcgctgaataccgtggccttaaatcattctacaacttgaaaaaataataagttatttaaaacaaagagcgcatctaaaagggtgcgctttttaagatataagattaaagaatggataaatcaaaaaagaaaacggactctcgagtgattaaaactcgctgctgtattgaagaaactttcttgaagctgttaaccgaggttccttttgagaaattaacgacgactcgtttgattaaggagtgcatgattagtaaacggaccttttatgcccattatttagataaatatgatttagcggagcaactgattgaccgagaactaaagttttttgaaaatctcctctttcagcgctttcaaagtttttatgtcttattaatcagtgacacagattgcgtttttaatgattaggatgatgtagaaaacattgacaaactttttcgatccatagtttttatttcttggaatatataggaaaattatgccaaacttctttcttatgattttaataaatttaaagactaatatcattaggttgtggttacaagtcctgcttttattcgtagaaatcctgctttttattatgctataataagcatagtgaattactgaggagagactattgtgaactataaatttttgctttttgaccttgatcacacgcttttagattttgaagcagcagaagatgtggctttaacacaattattggaagaggcccaagtacctgacgttcagacttataaggatttttatattcccatgaatcagcaactttggcaggatttgaccttgaataaaatcagcaaaaaagaattggtcaacacacgttttgctaagctttttgcccattttggtcaaaaagtggatggtcgtacccttgcgcatcgttatcagaattttctaagccagcaagggcagactttgactggtgctgagactttgttagaaaaactaactgatgagggttatcgtatttttggagcaaccaatggtatcgccaatattcagacagggcgtatggctaattccaacattgcatcttattttgaacaagtctttatctcagatagaattggttttcaaaaacctgacaagtctttttacgattatattgctgatgatattgctgattttgattatagcagagcactgatgattggcgatagtctcttagctgatattcaaggcggcaataatgcagggattgatactgtttggtacaatccttatatcaaaaccaatgagaccggtataagaccgacttatgaagtcaatgattacaagcaactccttgccttattagtacgaaaaagctgagactgttcatcatggactcagtttttttatagatttactgattctaagaaaaatctctgaagtttttgctgggatctggatgaggaacattgtgacgttcatgggctctgtgacgattagccatattgatgcgcatcataagccgattttgcaggactaaaatcaaagctaagaaaatgagatgggatttcagtaaaatcattagtataaaacctgttaagatagtgcagctatattgcagccaagcttttaggtcaaagcgataaaggtctttgttatagcgggaagtcgctagaacacccagataaaagctaataataccagcaagaaacagtataaaaccaatattagcatggtgggattcagccagaaattcgatacctacagtgaaaatattaataccagcaaagattggtaggtgagcataaaagagaatactagcagttgtttcttggtgatgattgatatttaaaaaagtttgtcccatataaaaaacaaaaagtgttgccattccaaaaaagagcatgaacccagttaaaggctgatcttttaaaggataggttttgataatagcaataacggattctccaaaggttaaaagagttaccaaatgcagacgttcaacgatatgcgggaagttgagcagctgatgattgtaaaattttctgctgaagataggaagaagattgggcaggagataaataagagccgtccagatattgagaggtagcaaacctagtgctaaacccgccaaaggcagactgtaactcagctgcgatagtatgctgagcttaatattatgactaaaacctaattttttcccttttaaaaaatattgcagagcaataaaagcataggctagcatcagcaggaaattaaagagcatcagctgaggatttccagcatagtagcccttaatattgagactgaagttgagcgaaatattgcccactataaacatgagagcaataatcgtgtaaatatcctgcagtctagaatctccgtatttattaaaataaagcacttcattatgccagatattaaagataataatattagtcgtaataaaagctaaaacttcttgaagaccaatgtggttgagatgaatagcagaagtcagctgaccaatagccaaaacaacagcaagatcgaaaaagagttcatagttggagacacgttttgataaaaactgagacattctttttcctttctttaaaaatacgtcgttattttaccaaaaaagcagaaggaataaaagtaaaactaatcgcagtaaagtcagaaaagttaggtcatttttgctataataaagattatgaacgaactgattaaacataagctggaattgctgccagatagtcctggctgttatattcacaaggataaaaacggcaccattatctatgtcggtaaggccaagaacttaaaaaaccgtgtgcgtagctattttcacggcagccataataccaagacagaattgttggtttcggaaattgaagattttgaatacattgttactgggtcaaatacagaagctttacttcttgagattaatctcattcaggaaaataagcccaagtacaatatcagactcaaagatgataagtcttatccttttattaaaattaccaatgaaccttatccgcgtttattgattacccgtcaggtgaaaaaggatggcggtctttattttggtccctaccctgattcgggagctgctactgaaattaagcgacttttagatcgtctctttccctttaaaaaatgcaccaacccagccaacaaggtctgtttttattatcatctcgggcaatgcaaggcgcataccatttgtcagaccgaccaaacctattgggatagtcttaaagaagatgtgaaaaactttctcaatggcagggacgataagattgtcaatgaactgcgcgataaaatgaccaaagcttctgagctcatggaatttgaacgtgcagctgaataccgagatcttattgagggcattggtctgttgcgaaccaagcagcgcgtcatgaatcaggatatgcaggatcgtgatatttttggttattatgttgataaaggctggatgtgtgtgcaggttttctttattcgtcagggaaagcttattcagcgcgatgtcaatatgtttccttattacaatgagtctgaggaagattttctgacctatgtaggacagttctatcaggataaccgtcactttattccaaaggagatttttattcctagaaatattgatgaaactttggttaaagcggtggtcaatactaagattatcaaaccgcagcggggcgagaagaagcagttagtcaatctggcaacgaaaaatgctcgtgttagcctgcagcagaaatttgatctcttggaaaaagatattcgaaaaacgcatggtgcgattgaaaatattggagatttacttaatattcctaagccagtgcgcattgaagcctttgataattccaacattcaaggaaccagtcctgttgcagctatggttgtttttgtggacggcaagccaagtaagaaggattatcgtaaatttaaaatcaaaaccgttatcggacctgatgactatgccagcatgcgtgaggttatttatcgcagatatagccgtgtcatgcgagatggactgacaccaccagacctgattattattgatgggggacaaggtcaggttaatgtagcgcgtgacgttatcgaaaataaattgggactcgatattcctatcgctggtttgcaaaaaaatgataagcaccaaacccatgagctgctctttggtgatccgctggaagtgattcctctgcctagaaattcagaagagttctttctcttgcagcgcattcaagacgaagtgcatcgctttgccattacatttcataggcagctgcgcggtaaaaacaccttctcatcaaagttggacggtattgcagggctcggccctaagcgcaagcaattgctgatgaaatactttaagaatcttcctaatattcaaaaggccagcctagatgatattatcaactgcggcattccaaaaaatgtcgcggagaacattcaagagagcttgcgagaggaaagagaaaaaggttaaatgttagatactgttttaattttaggcaatatacatcagcaacttattatggaatcataaaagaagatgttgaaaaagctgtaaacagtttcaaaaagtggtaaaataaaagaacaactataacagaattagaaggatgttcgtttatgaaatttttagaactgaataaaaagcgccatgcaactaaacattttaatgataaaacagttgattttaaagatgttagaacagccattgagattgcccaattagctcctagtgctcataatatacagccttggaagtttgtccttgttaaagataaaaaggcagccttggctaaagacctgcctgctttaaataaggatcaggttgaaggcgctcagtatgtcattgctttgtttaccgacaccgacttagttcagcgtgcgcgcaaaattgcacgtattggcagcaaaaacctgcctgatgatatgattggttatttcatggaaactttgccagctcggtttgcggattttgatgaacaaaccaaaggagaatatttggctttaaatgcaggtttagtagctatgaatctagtcttggctctaactgaccaaggcatttcgtctaatattattcttggttttgataagacgaaaaccaatactattttagatattgatgagcgttttcgcccagaactcttgattacagttggttatacagatgagaagatagaaccaagttatcgtttgccggttgaagaaattattgaagaaagataggagctgtacctaagatgtttgtagattttcaaaaagaggtagataaacgccgcggagatattttggccgatttgtttcggattttacagattaattctgagcgtgatgacagtaaggctgataaaaaacatccttttgggcccggtcctgttcaagctcttgaacattttttgaaaatggcagagcgtgatggttatgagactaaaaatgttaataactatgccggtcattttgaatacggtcaaggagatgaggtcttaggcatttttgcccatctggatgtggtgccagcgggtagcggctggaaaacctctccttatttgccagaaatcatcaatggcaaactctatgcgcgtggtgctagtgatgacaaaggcccaacgattgcctgttattatggtttaaaaattattaaggaattaggtttaccagtctctaagaaagttcgttttgttgttggtactgatgaagagtctggttgggctgatatggattattattttgaacatgttgacatgccagagccagattttggtttttcaccagatgcttattttccaattatcaatggagaaaaagggaatattacggaataccttcattttggcaatagcaatggtggttcttttatccttaaatctttcaaaggtgggctgcgtgaaaacatggtaccagaatcagcaacagctgttttttcagcaacgatttgtttagctgaattgcaagaatctttgaccgcttttacagaacaacatgctttaacagcggatcttaaggaagaagcagggaattttgtcttgaccttgcatggcaagtctgctcacggttcaacaccagaagcaggtatcaatggagctacttatttggcacgcttcttgtcacagtttgattttgctggtgatgctaaagcttacttggatttagctgccaatgttttattagatgatcatgcgggtgaaaaactgggagttgcctataaggatgagaagatgggttctgtttccatgaatcctggcgtctttagttttgattcccaatctgaagacaatagcattgcgcttaatttccgctatcctcaagggacagatgcacagaccatcaaggccagcctagaacaattatcagtatcaggtgttagagaggttactctgtctgagcatgaacaaaaaccccattatgtgccgatggatgatccgttagtagctaccttgctagcggtttatgaaaaacatacaggagataaagggcatgaatgggttatcggtggtggtacctttggacgtttgctcaagcgcggagttgcttttggcgctatgttcccccattcgacagataccatgcatcaagctaatgaatttgttgaagtgaacgatctgtataaagcagctgctatttatgcagaagccatttatgaattgatcaaatagcgagacagagacaagaaagttcaacgaatattatttgtgtaacggtcttatccaattaataacgagaaagaggttattatgacaagtcttgaagaaattaccaaagccattatggcagacagtcaaaataaagtttttacagaaaaaaatattgaaccgctttttgcagcgcctaaaacggctcgtattaatattgttggtcaagcaccgggaattaaggcccaagaatcgcgtctgtattggaatgataaaagtggagatcgtctgcgtgagtggatgggagtggactatgatactttttatcattcaggctattttgctgttatccctatggatttctattatcctggtaaagggaaatcaggagacttaccgcctcgaaagggttttgcccagaaatggcatcagccgattttggatttgctgcctgatatccagttgacgattttaatcggcaattatgcacaaaaatattatttacatcaaaagtcttctgttaaattgaccgatacagttgcacattacaaaaaatacttgcctgactatttccctctcgttcacccctctcccagaaatcaaatttggatgtctaggcatccttggtttgaagcgcaggtcgtgccggatttaaagaaaatcattcagcaaattattcaatcatcataaaaatcagacatgacactgtatctacaaacctgaacatataaaaatacctctgctgagatctagtaaactagaaggcagaggtatttttatggataaaagcatgttcagtcagcttgttaaagtatcagtcaagaattatcgtagataacctttaataagttaggaaattttttgtttaattcctcatttcgtaaggagatacaacgttttcggccttcaatacgtacatatataattccgcattctcttaaagtcttaaaatgatgggagagattatttttttgtcctaaactagaaaatgagctacagtttttttcatcttgagcagaatacagttctttgaatatcgctaatcttgttggttcgctaagtgcagagagaatctgctctaaattaatatcattaatagatggatgtgatagtgatttcatttatttcttcctttttattgacattttaacacaaagagtattataataaaattgttcaataattattgaacaataaaaaggaggttgtttatgacaatacttgaacactatttttatttatctgatttggcagtaactgataaaagaagtctccagaaattgtgctgtctcttcaaagatgatgcgattatagaggctaatgatgggcatagatattctggaagaagagagatcgattcattttttacagaattttttagtaggaatgctgaaacaagacatttatatgatatccgggaactatcggatactgttcaacaggccaactggggagttgtttgcagaagaaaaaatggagcatatattgccttgactggtaccgatattgccgaggttgaagaggggaaaatcagtcatttaaccattactagtaataattagtagatgagggtaagtttatgattattgataatatccagcatgttatgtttccaatagcagcgcaggttgaaaaactggagaaagcaaaagttgataaagctattttattttgtacgacaccgcatcctgaaagagctcgttcctataaagaactaaaagaagagatgtcaatactttttaaagttctaagtggagatggactgcaggttgtttcactagacagaatgaaacaaaataatcaagaagttgttcaagcgattcaaaagtatccgcaaaagttttatggctttggttctgttccgcttggtttatctttaaatgatactattgattggatcgaagaacaaattgtaagaaatggtttgaaaggcttaggagagtttactcccggttcagatgaacaggttggacaattagaaactattttccaagcgttagctaaatttcctagtttacctgtttgggtacatacttttaatccagtcagtttaaaaggcatccaaactttgatgaacttaacaaaaaaataccctcatatttctgtaatctttggacatatgggagggtattattggatgaatgttattgattttgtcaaagaaacgccaaatgcttttattgacttatctggaaccttctctactttggctgtaaggatggctatcactgaaattcctcaaaaatgtttatttggttctgacgctccttatggagaaccctttatgagtaaggaattggttgaatacttggcacctactgatactattagagatatggtattgggaggaaatattcaaaaattgttagagctgtctaattaagagagagctagtgagatcgaaaagtatcacttatcaaacgaaatgtttgatgtggttaaagttgtagctgtaatgaataagataaaaaggatggggcaaaagtgttccgaccttttttatatttaatgtttttgcagaaggcaattatttccccaaacaaaactggctaaagagttgtgtaatgagttcatctggcgctgcatcaccagtaatctcaccaagaatttcccaagttcgcgtcatatcaacttgcaagagatcaacaggcatgccgagttccagaccgtcattaacggcctgtagacttttaagagctttttcaattaaggaaatatggcgggcattggatagataggtggcatctttttcgacaatggcggcattatcaaagaaaagcttattgatgcgctcttcaatgacatcaatattctggtttttgatgacagagattttgatgcaatcttctggaagctgatccgtttcaatttgctctgggaggtctgtcttattaagaaggataagacggttgctgttttggctgatttctaaaagagttcgatcttgatcagtcagtttctcagcactgttgagaacgagtaagaccagatcagcttcttctaaagcttttttagaccgttccaccccaattttttcaaccagatcatcagtttcacgaataccagccgtatcaatcagtttgagaggaacacccttgatattgacatactcttcaatgacatcgcgagttgtcccttcaatgtcagtaacgatagctttttcttctcgtaaaagattgttgagcagactggatttgccaacattgggacgtccaatgatagcagtagataagccttcacgcaaaattttcccgcggcgggctgtctttaaaagattggttaagagggtttcgaattcctgagtcttctctcgcatgagtgctgtcgtcatttcttccacatcatcatactcaggatagtcaatgttaacctcaacttgggccagagtattgagaatttcctgacgtgtgttattgataagatttgaaagggagccatccagttgttgaacggcaacagccatggctttgtctgttttggcgcgaatgagatccattacagcttcagcttgcgctaaatcaacacgtccattgagaaaggcacgcttggtaaattcaccgggatctgccatacgagcaccagagcggagaaccaactgcaggatttcattggtgacagccacaccgccatgcgtattgatttcaatcacatcttcacgtgtgaacgtttttggagcgcgcatgactgagaccatcacttcatcaatgattgccccattctcaacaatatgtccgtaattaatggtatgggagggaacatcatccaaattttttcccttaaaaatctttttaataatagctagtgctttcgatcctgaaatacggacgatgccgattgccccttcgccaagaggtgtagcgatagcagtaatagtatcaaattcatttgttatcatagctttattttagcgcaaaaaaaaggaagccgcaagattttgaaataggtaggcaaagaagatttcctttaacaagaaatccaattcatgttataataaagtgattatatctgaatgaaggagagcgcatggaagaacttaaaaagattgctggtgttagggcagctcaatatgttgaaaatggtatgattgtgggacttgggacaggttcaacagcctattattttgttgaagaaatcggtcgccgtgtgcaagaagagggcttgcaagtgattggtgtgacgacgtcaagtcggacaactgctcaagctcaagctttaggtattcctctcaaatctattgatgaggttgactctgttgatgtgacagtggatggagctgatgaggttgatcctaatttcaatggtattaaaggcggcggtggtgctctgctgatggaaaagatagtaggaacattgacaaaagactatatctgggtggttgatgaaagcaagatggttgatactttgggagcctttaggttacccgttgaagtagttcaatatggtgctgagcgtctttttcgagagtttgagaaaaaaggctataaaccttcttttcgcgaatatgatggtgttcgctttgtgactgacatgaaaaactttatcattgatttggatttgggctctatccctgatcctattgcttttggcaatatgttagatcatcaagtcggtgttgttgaacacggcctcttcaatggtatggttaatcgtgtgattgttgcaggtaaagatggtgttcgtattttggaagctaataaataaattaattaatgatgatggcggagtgtttgtcccgtcgtcttagattggaaaactatgtcaacttttaatcgtattcatcttgttgttttagactccgttggaattggggcagcacccgatgctaacaatttctctaatgctggtgttccagatggtgcatcagacacactaggacacatttcaaaaaccgttggacttaatgtgcctaatatggctaaaattggtttgggaaatatcccccgtgatacgccgcttaagacagttcctgcggaaaaccatccaactggttatgttacaaaattagaagaagtctctttaggtaaagatacgatgaccggacactgggaaatcatgggacttaacattactgaaccttttgataccttctggaatggttttcccgaagaaatcatcagcaaaattgaaaaattttcagggcgtaaggtcattcgtgaagctaataaaccatactctggtacagctgttattgatgacttcggtccccgtcagatggagactggtgaattgattatctatacgtcagctgaccctgttctgcaaattgcagcacatgaggatgtgattccacttgatgaactttaccgtatttgtgaatacgcacgcagcattaccctagaacgtccagctttgcttggtcgtatcattgcccgtccttatgtcggcaagcctaggaatttcacgcggacagctaatcgtcatgattatgccctatcgccatttgcaccaacagtgttgaataagttagcgaatgcgggtgtttcaacttatgctgtcggtaaaatcaatgatattttcaatggttcaggtattaccaacgatatgggacacaacaaatcaaacagccacggtgtggacactttgattaagacaatgggcttgtctgcgttcaccaaaggcttctcgtttaccaacttggttgattttgatgccctttatggtcaccgtcgcaatgcacatggttatcgtgattgtttgcatgagtttgatgaacgccttccagaaattatcgtagcgatgaaagtagatgacttgcttttgattacagctgaccatggtaatgacccaacctatgcgggaacggatcatacacgcgaatatgttccgcttttagcttacagtccatcatttactggtaatggagtcctacctgttggtcattacgctgatatttcagcaacgattgctgataactttggtgtagatacagctatgattggtaagagtttcctagataaattaatataagatgggaaattatgtcgtcctcttaagaggtgtcaatgttggtggcaagaataagcttgtgatgagcgatcttcgccagcaggtaaccgatatgggatttgtcaatgtcaaaacctatatcaatagtggcaatctcttctttcagtcggattgtcctcgtgcgaacatcagttctcggtttgaacaattctttgcagaccattatccctttgtctagtatttttccctctttttcacaagaggagtacgagaaagattaccaagaactgcctgactggtggcttcaagacttggctcgaaagggagccctctttttcacagagaaaatgcataaaaaaagagttattgagcgtatcaaatctttttctctgagagatgaagtgattcattttggagaattgtgtatttactggggcaaatacacagaggcggagtatctgaaaacaagctaccataaacagctcatcaaagaagatttttaccgacaggtaaccatttgaaatagcaaaacagctgagaggattttaagtttattgaaaaatggataatagaatgaagtcagaagcaattttgtcagtagataggaagtatcgttacgttcttactagaacatgggatgaaactttgcctaatattatgtttgttgggctaaatccctctacagccgatgaaacaacagatgatccgacaattaggcgttgtatcaactttgctaaatcatggggatatggtgggctatatatggttaatctttttgcttatcgtagcactaatcccaacaatatacgaatagttgataaccctattggtgataataatgatagttatatctcacattacgctaaattatcagataaggttgtcgcttgttggggcaatcgtggttcttaccaaaagcgctcaaaagaagtgaccaacttactagaagaaatatattgttttgggcaaaataagagtggcgaaccgaagcatccattttatttgaaaaaagaaatttcactcattaaatataaataaaggaaaaactatgtcattacttaaaaaaatttatgaaacacgtgattttctaacagcaaaaggagtccaaaagccagaattcggtctcattctaggttctggtcttggtgaattagctgaagaaattgaaaatgctcttgtccttgactatgctgacatccctaactggggacgctcgacagtttcgggtcatgctggtaaacttatttatggtgaattagcaggtcgtaaagttttggccttgcagggacgttttcattattatgaaggaaattctatggagcttgtaaccttcccaattcgtattatgaaagcacttggctgtcagggacttatcgtcactaatgcggctggcggaattggctttggtccgggaactttaatggctatttcagatcacatcaatctgacaggagccaatcctttgatgggggaaaatcttgatgattttggatttcgttttcctgatatgtccaatgcttatacagcagattatcgtgaggttgctcaccaagttgcagataagattgggatcaagttagatgagggtgtttacatcggtgtttctggtccatcctatgaaacgcctgctgaaatccgagctttcaagactcttggagctgatgcagttggtatgtcaacagtaccagaagttatcgtagctgcacattcaggtcttaaggttttgggtatttctgccattacgaactatgcatctggttttcaatcggaactcaatcatgaagaagttgttgcagtgacacagcagataaaagaagattttaagggactggtaaaagctattttagtagaattataaggagtcagtatgagaattcattttatccttcacgaaacatttgaggcaccgggtgcctacttagcttgggcagctcttcgtggtcacgacgtatctatgactaaggtttatcgttatgaaaagcttcctaaagacattgatgactttgatatgttaattcttatgggaggacctcaaagtccttccagtacgaaaaaagaatttccttattacgacgcccaagcagaagttaaattaattcaaaaggctgctaaggctgagaaaatcattgttggcgtctgtctgggtgctcaattgatgggagtagcttatggtgcagattatttgcatagtcctaaaaaagaaattggcaattacttgatttctttgacagaagctgggaaaatggattcttatttaagcgatttttcagatgacttgcttgttggtcattggcatggagatatgcctggtttgccagataaggctcaagttttggccatcagtcagggctgtcctagacaaattattaaatttggtcctaagcaatacgcttttcaatgtcatttggaatttacacctgaattggtcgctgccttaattgcgcaagaagatgatttggatactcaaagtcaaacagaaacttatgtacagacagctgaggaaatgcagacctttgattactcgtcaatgaatcaagccttgtattcatttttggatcgactgacagaaagaaaataatatgaagaaattaaaatgaaaggaattgactccgtttctgagttttattctgaaaataaaagaaaggaaagagagcagattttttaatttgaactcgagcggaaagcttggaaaatagataaacctcatgggaaatcaggcttttcctgcggtttcctaattttcagtcgctttctggttgctcttctgtatcataaattatgtctattcatattggagcccaagtgggtcaaattgctgataaaattttacttccgggtgatcctcttcgtgctaaattcattgcagaaaattttcttgaagatgcggtgtgttttaacgaagttcgtggcatgcttggatttacgggaatttataaaggtcatcgcgtttctgttatgggaactggcatgggcatgccttctatctcaatttatgtgaatgagctcattcgttcttatggtgttaaaaaattaattcgtgttggaacagcaggttcgcttaacaaggatgtccatgtgcgtgatctcgttttggcgcaggctgcagggacaacttccagcatgattaaaaacgaatggccacaatacgattttccgcagattgctgatttctcaatgcttgataaggcttatcatattgctgaggatatggagctgacaacacatgtgggaagtgttctgtctattgatgctttttattcagattttactgacaacaatattaagcttggacaaattggggttaaagccgttgaaatggaagcggcagctctttattatttggctgctaaacatggtgtccaagctttgggaattatgaccatttcagacagtttagttgctgacgaagatacaacagctgaggaacgccaaacaacctttactgacatgatgaaggtaggtttagaaactttaattgcttaatatgactgaacaagaaaccttaactatccttttggatgtctatgcttattatcaggcttaccaaattgtaaaagccagtcagtttttttcagatgatattatctttctcttagaattgttaaaggaaagacgcgagcttaatgttgattttctctttcagaaccaagtgcacctgcaagaattggaactgacttatcacatttctctcttggataatgcttatgaagaagagcttttggctaactatattatggatttagaagccaagttgcgcaatgatcatattattgattttgtcagaagtgtcagtcccattttgtatcgtttattgatgcgactgatgcaaagtcaagtagcagatattaatgattatatttatgatgctaaaaatgatcaatacgatacttggaagtttgacaagatgcatgactctgccaacccctttgttcaaaactttgttgctaagggaagagacagcaagattacttcaagaagtctggcggattttattcagttaactgatttgcctcaggctattaaagacaacattttgcttttaagagattttgaaaaatcggtacgaaatcctctggctcatcttatcaaaccttttgatgaagaagagcttcatcgcacgacaggcttttcttcccaaacctttttggaaaaaatcattcaattggctgtattttctggaattcattatgataatgacaagttttattttgacaaagtgaatgaactcattaagcgtatctatcagaattagcaaatattcatcaattttgtttataataaaaaaggcaacagttgcagctgtcgcctttttgcatactatttatctttaacttcttcaagaagatagtcgataaatttttctcccattttggaaagattagctttttcatgcttaaggtaaatgatgtcaatttcatcgtctacttcaagcgaaatcgaaacgatattgtcgccgttaaggttactatttaaaatcccagttgcaatggtatagccgtcaagaccaatcatcagattgaagagagtcgctcggtcggaaacaacaatagattttttatgagaaatctgtgacataatttcctctgaaaagtagaaggagttatggataccctggtcataactgaggtagggaaagtcttctaaatcgctgagagatacggactgatgtttggctaaaggattatccttactgacaaaaatatggggatgtgctttgaaaaggctggtataagtcaaatgattgtcatcaaacattttggtgagaacatcatgattgtaactatttaggaaaagtaccccaatttcagagcggaaatttttcacgtcatcaataatttcgtaggttctggtttcacgtaaaaaaagctcataacgcgtcatatccgtttccttaagcagactgacaaaggcattaaccacaaaggcgtagtgctgagctgaaacactaaaaagttcacgcgtatgaccttggcttttatagcgttcctctaaaagagctgtctgctcaacaacttggcgggcataggataggaattcaacaccatccttagtcagggtgatccctttagggttgcggataaagatttcaatacccatttcgcgttccaaatcacgaaccgcgtttgaaagtgaaggctgagtaataaatagttgtttggcagcctcattcatgctgccagtttcgacaattttgataatataatgtaactgttgaatacgcatgcctttattttagcacaaaattagtattatgaatagctttcccttgtggtgattgcagacatatacgtcaactgattcttagttgacatttttttcatttcaagctataatgtaaaaaatgaataacctttaatttagtccagagaggctgtcaagggaaatcaagattaacaggcagaggtacaatctgcccacttttttgtgtaaccttgccagttagttggtaaggtttttttcatagaaaggcagttatgattttaaaagaaaatctaacggtagttagtcaatgtgaaattgctcctcgtatttttgaaatggttttaaagggtgatatggttgcgcaaatgcaggccggtcagttcttgcatattcgtgttcctgatgctagtaaactcttgcgccgaccaatttccatagctgacattaacaaagaagctcaagaagctaccattatttaccatattgaaggtcggggaacggctatcttttctcaacttaaagcaggagataagcttgattgtttaggtcctcaaggcaatggctttgacctttctgtcattgataaaggtcaaaaggctttgattattggcggtggtattggtgttccgcctttattggaagtggctaagcaactttgcaaaaaaggcgtggaagcctatgctgttttgggctttgccaacaaagatgcggtgattttggaagaaaagatgtctcaatatgcgactgttgtggtaacaacagatgatggttcttacggtcaaaagggttatgtatcaacggtcgttgataatttggatttttttgctgacgccatctatgcttgcggcgcaccaggaatgctcaaatatgttgataagaaatttgaaaagcacccgcatgcttatttatcaacagaggaacggatggcttgcggtatgggagcatgttatgcctgcgtcgttcatgtcaaaggtcaagaagatgctcaaaacctgcgtgtttgtgaagatgggcctatatttgaaactggtcagattattctagattaggaggctgatatgacaaatagacttgctcttaaattgccgggcttggatttgaaaaatcctatcattccagcctcaggctgttttggctttggtcaagaatatgctaaatattatgacttaaataaattgggttctatcatgattaaggcaacgacccagcagccgcgctttggaaatcccacagcacgtgttgcagaaaccccttcaggaatgctcaatgccattggtctgcaaaatccgggtgttgatgctgtcattgctcaaaaattgccttggctggcagagcattacccagatttaccaattattgccaatgttgctggtttttccaatgaagaatatgcttatgtgtctgaaaaaatctcacaggcaccaaatgtcaaggctattgagcttaatatttcctgtcctaacgttgaccacgggaatcatggtctgcttattggacaggtgccagaactaacttatgctgcagttaaagctgctgttgaggcttctcaggtacccgtttatgttaagctgacacctagtgttgccgatattacaactgttgctaaggcagttgaagctgctggagcgactggctttaccatgatcaacactttggttggtatgcgttttgatttaaagactaaaaaacctatcattgccaatggtacaggtggtatgagtggtccagcagtctttccagtagctctcaaattaattcatcaagtggctcagtcgtctcagttgccaatcattggtatgggtggtgttgattcagctgaagccgccttagaaatgatgatagctggtgcctcggcgattgctgttgggacagctaattttacagacccctttgcctgtcctaatatcattgaagacttacctaaggttatggataaatatggtattgaaacgcttgaacaactcagaaaggatgttagaaatgcgtgaaccccgtcccttaattgctcttgattttccttcttttgatgatgtgaaatccttcttagcacaattcccaccagaagagaaactttatgttaaaattggtatggaactctattatgctgtcggtccagagattgtgcgctatgtgaaaggtcttggccattcggtctttcttgatttaaaattgcatgatattcccaatacggtcaaatcagctatgaaggtgctatctgatcttggtgtagatatgactaatgttcatgcggctggcggtgttgaaatgatgaaggcagcgcgtgaaggtttgggaaaaggttcaaaactgatcgcggtgacccaattaacttcaacgtctgaagaacagatgcatgatttccaaaacattcaaaccagcttagtggagtcagttgttcattatgccaagaagactgcggaagctggtcttgatggagttgtctgctctgctcatgaagtggaagccatcaaatcagccacgtcgaatgattttgtctgtctaacaccaggtattcgtccagcgggctctgccattggtgaccaaaaacgcatcatgacaccagcagacgcacgtaccattggttcagactatatcgtgctaggacgccctatcacgcgagcagaggatccaatagccgcctatcaagcgattaaagctgaatggaatggctagggagacttatcaagtaggaattagtaaaaaattactaaaggaatgaaattgaaagttcttggttttattggtagaactgaagaaataaaggagaataattatgacattagcaaaagacattgctcgtgatttactagatatcaaagccgtatatcttaagccagaagaaccttttacttgggcatctggcattaaatcacccatttacacagacaatcgcatcacgctttcttatcctgaaacacgtactttgattgaaaatggttttgtggaaaccatcaaggaagcatttcctgaggtagaagttattgcaggaacagcaacagcagggattcctcatggtgctattattgcagataagatgaatttgccctttgcttatattcgcagcaaaccaaaagatcatggtgcaggtaatcaaattgaaggtcgtgtgactaagggacaaaaaatggtcatcattgaagatttgatttcaacaggtggctctgtactggatgccgtggcagctgcacaacgtgaaggtgctgacgtgcttggtgtggttgccatttttacctacgaattaccaaaagcaacagccaattttgaaaaggctggtgtgaaattggtgactttgtcaaactacagcgaactgattaaagttgctaaggtacaaggctatattgatgcagacggtttaaccctgctcaagaaatttaaagaaaaccaagagacttggcaagactaaaataatatcaaaaaggtaggacattatagatggaattttcccattttcttatttgagtaataatctaaaagtgccattaaaatgttaataaactgaacacggctacgacactgtgcaaaaagataaagactgcctagatgctggtgcatcttcgtcagctttcctattttgcggtgtgtcgctttacgcctttgtatcttaataaaggaggtttctgatgaaaattcatgtgccatttaaaaatcatattatccctgatgcttatgctaaaaaagcaagtgaaactaataaaggttatgctgttaaatcttttccttttgaaattgtagacattccagagaatgctaaaaccttagcctggactttggtagattatgattctattcctgtttgcggttttgcctatattcattggactgttgctaatgtaccaacagatgtcactgttatttcagaggattttgcaagacaagatcaaaagcatttaaaggggaaaaacagtctggtcagcaagttcctaacaactgattattctgatatgtacgatggttaccttggcccttatccgccagacaaagatcatcactatacccttactgtctatgcgcttgatgatgacttatctcttaatgcgggtttctatcttaatgaactcttacatgcaattgaaggtcatgtaattgcccaagatcaaatggatttggtgggcagagcataatcaaggagacatcttatgactgtcaaggtttaaatctgtgtcaatgcagatggtctacagtttctaaaaagtttatggaaggtcaaaagcttggacagattgaaaagaagacaaagaggctaaggatgtgaccttaacctctcttttgctatttaatcaaagaggtgcttggtatgaaattcacaaaacgtcagcttttagattggctgttggatgtaacgggagctgaggaagtctatccttttacccgagaaaaaagcaagtacacgcccgtcattcgacataggcgtaatcaaaagatgctggctttagtaacagaaaaagatggtaatctccttctaaatcttaagctcaaaccagaacatgtagaagatatgatggaaactaaaggtgtgattccagcctatcatatgaataagaaacactggcttacagttttggttaacgaaacagaattaacggagaatgaattgaaaaatatggtattggaaagcagtcaattgacgcagggctaataaacaaatcattggataggaaaagaatcccttcatgaattagacgaaaggagcataatatgcaatttccagatgcaacagctatggccaatgcagtgaagcaaaaagacgtttctcctagagaactagtaaaatggacgattgaaaaagctgaaaagcataatccttccttaaatgctatcgtcagtcaacgctatgaaagagctttgcaagaagcgcgggaacgcgatttcacaggaaaaccttttgcaggtgttcctctctttctcaaagatttaggacaggaacaggctggggaattatcaacatcaggctctcgtctactggctaattatcgtgccagtcattctgacaactatgtcaaaagcttagaagccttgggttttattattcttggtcgcaccaatacaccagagtttggttttaagaatattagtgactctagtttgcatggtcaggtcaatttgcatgatgatgtcagccgcaatgcgggtggctccagtggtggtgccgcagccttggttagctcaggtgttgtgaccttagcggctgccagcgatggtggtggctccattcggattcctgcttcttttaatggccttattggtctgaaaccaacacgtggtcgcattccagttggacccacttcttttagaggctggcagggcgcctctgttcagtttgccctgaccaagacggtgcgtgataccaagcggctgctttattatcttcagacctgtcagatggaaagtccctttgttttaccgaccttatccaaagaatcgctggaacagcctttgaagaaaaaactgaaaatagccgtattgtttgattcgcctattgctagtcgtatttctcgctcagctatttctgccgttcagcaaatggttaaatttctggaagcagcgggtcatagggtagaagaagtgtcacaacctttaaatggtatagaggccatgaagtcctactatattatgaatagtgtcgaaacggctgccatgtttgacgggcttgccgcttccttgggacgccctttgacactggatgatatggaggtcatgtcttgggcactttatcaatccggtcaaaagattcctgccaaatcttattctaagatactcaatcaatgggatcaatacagtcatcgcatgactgtctttcatgaaaagtatgatcttattctaacaccgacaacagctgaagttgcacctaaacacgatcaatttcaattgtcaagtaccttagaaaataaattaaagcatatagctgattttgataggaattgccagcaagagctcatttgggagatgtttgctgacagtttagcttggacgccctttacacagcaggccaatctaacaggacagcccgccatctctctaccgctttatcgagataagcagggtctgtcacttggtgttcaattgacagctgctaaaggcagagaagatttgcttttagctcttgcacagtcatttgaggagcagtcactttttgtctaagcgggaagattgcagacaaaatacttgaaaaatttctgagaaaagtgtattttcgcaaagtaagccttttcaaacttgcaaaatacttgattatatttaaggagaaaatacataatgaaaaagcattttttcatgacttttagcctcttgctagcggctgtttttctagttgcttgttccaaatcttccgattctggacagaggaattgggataagataaataagagaggaatgcttaaaattgctactgcaggaacgctttatccgcaatcttatcatgatgatcataataaattgacaggttatgatgttgaaattctaaaagaaataggaaaacgtttgggattgaaagttcagtttactgaaatgggtgttgatggtatgctgacagccatcaagagcggtcagatcgatgttgctaattattccctagaagacggcaacaaaaatatcagtaagtttttgagaacctctccctataaatattcttttacgtcaatggttgtccgctctaaagatgattcaggtattcattcttggtcagacattaagggaaaaaaagctgccggagctgccagcactaattatatgaagattgctaaaaaattaggagcaaaattagttgtctatgataatgtcaccaacgatgtttatatgaaagatttagttaatggtcgtacagatgtcattatcaatgattattatctgcaaaagatagctgttgcagcagtcaaagacaaatacgctatcaaaataaaccaaggactttatgccaatccttacagcactagttttacattgtctttgaaaaacaaagtactgcaaaagaaaatcaataaggctgtgaaagacatgcgcaaagatggcaccctaaccaagctatctaagaagtttttccaaggagaagacgtcactaaaaaacatcataatagctataaaaaaattgatatttctgatattgattaatagcaggcgatctcttttcaaaggatcgctttagttttgtcttttttcgtaactggaatgctgtttgaaaatttgttacaataggtttgataggtgcgtgatgcttttcagctatttcagccctagatagaaagataaggatagatgtaatgtttattaattttcatctgatcatcaaaagtttatcctttgttttgacaggcattccatataccttaggtatttcagttcttagttttctgacaggctgcctcttgggaatctttatttctttcttgaggatgtctcagaattcttggcttaggtccttggcgcggatatatatttctatcatgcgtggtgttcccatgcttgtcgttttatttgtcctttattttggtctaccttattttgaggtgcagctgtctgccttgctttgtgcctatattggttttagcgcagtcagtgccgcctacatatctgaaatatttcgagcttctatctcagcagtagataagggacaatgggaagcagcaagggctcttggtttgcctatgacatccattttaaaaagtattattttaccgcaagcttttcggattgctattgcgcctttgggaaatgttatgttggatatactcaaaagctcttcattagcggctatgattacagtaccggatatttttcaaaatgcgaaaattatcggtggccgcgagtatgattacatgtctatgtatattttgattgcttttatttattggcttctttgttttttgtttgaaatgtttcaaaatcatttggaagcaaaactcagtgtttattgattaacttagtaaggagaaatgtatggaacattcagcttggcatgatttgattaagaaagaacttccagaaggctattttgctcagattaatcattttatgaatgaagtgtatgcgcaaggtgttatttatccacctagagataaggtctttaatgccattcagaccacacctttggataaggttaaggttgttattattggtcaggatccttatcacggacccaaacaggcacagggattatctttttctgtacccgatcaagtgcctgctccgccatctctccaaaatattttaaaggaactggcagatgatattggacaaaaacaaagtcatgatttgacctcttgggccaagcaaggtgtgcttttgttaaatgctagcttaacggttcctgaacatcaggctaatgcccatgccaatggtatctgggaaccttttacggatgccgttattaaggttgttaatcaaaaagagacaccggttgtctttatcctttggggtggttttgcacgtaagaaaaaggcacttattaccaattccattcaccatattattgaatcgccccatcctagccccttgtctgctcaccgaggattttttggcagtaaacctttctcacagacaaatcattttttagtggcacaaggtttagaacccattgattggcttaaataaggagatgttatgttacttataaaaaatggccgtgttcttgatcctaagtctggtcttgatcgggtattagatgttttgcttgatggtgaaaaggtcgtcaagattgcagaaaatattgagtctgtggatgctcaggttatcgatgcagaaggtcttgttgtagcacctggtttggttgatgttcatgttcattttcgtgaacctggccaaacccataaggaagatattcatacaggagctttggcagcagcagctggcggagtaacgacagttgttatgatggctaataccacaccgactatttctgatgtggcaactctgacagaagttttagaaagcgctgctaaagaaaatattcatattaaaacagtagctaccattacgaagcattttgatggtcagcatttgactgattttgaaacacttttaaaagcaggagcagttggattttcggatgatggcattcctttgacaagttctaaggttgtcaaggaagctctggatttggccaagaagaatgacacttttattagtctgcatgaagaagatccagagttaaatggcattttaggttttaatgaaaaaattgccaaagaacgttttaaaatctgtggagcaacaggcgttgcagaatacagtatgattgcgcgtgatgtcatgattgcttacgataggcaggctcatatccatattcagcatttatccaaggcagagtctgtcaaagtggttgaatttgcacaaaaattaggcactcaagtaacagcagaagcagcaccgcagcatttttccaaaacagaaaatcttttgttggaaaagggagccaatgctaagatgaatcctcctcttcgtttggaggcggatcgtctggctgtgattgaagggctcaagtcaggtgttatttctgtcatcgcaacagaccacgctccccatcatgcggatgaaaaaaatgtagcagatgtgactaaggcgccatcaggaatgacgggcttggaaacttctttatcattaggcttgacttatttggtagaagcaggacatcttagtttgatggacttcttagccaaaatgaccatcaatccagcacagctttatgattttgatgctggctatttagcagaaaatggtcctgctgatcttgtgatatttgcggataaggaggaccgtctggtttctaatcattttgcctctaaggccgccaattcgccctttattggtgaaaccttaaagggtcaagtcaaatataccatttgttctggtgaagtgatttatcaagcataaatgaggcaaaatattttattgtgcagaagcttcggtttaacatagtgattggaattttcgtatcagggaacttgttcaagtttatctaatcaaagaaattccgcctacccaagcaaactatcaaaaagggttataaatataagttcttaacgatttaaaaaaatgatatatctaatgtaaggaatatgatgaaaaagaaagcaattattataccggtcttatcaactttgcttttatctggtgctattttaacagcacacgttcatgcagacgatttaacgacggaaccatctgctgatagcagtactcaatcaagcagtctttccttttctgaacagacggctgactcaggacaagagactagtcaggtctctgatgcaatttcttctgttgcagcagtaaaatctgctgatgattccaaatcagtttttgaagatagtcattctgatgaagtctcatcatcttcagcaagcagcagccctaaacctgctgttaattgcgtatcagatgaagcaacaaccaccattctccacaccaatgatatgcatgggcgtttcttagaagatagcagcaatggtgttattggcatgccaaaattagcaggaattgcagctgaatccagaaaaaaagggactaccttgctattggattccggagatgctatccaaggtctgccaattaccaataacagtaagggagaagatgcagtagctctcatgaatgctacgggttatgatgccatgacggtgggcaatcatgaatttgattttggcttagatcaattaaagactttggtcaagaaacttgattttccaattatcagttctaatatttatgtcaatggcgtccgtctttttcaagcttctacagttattgacaaaaataaaaacattgatggggatgaatatgttgttattggtgtcacgacacctgaaacagccactaaaacccatccgcgcaatgttctgggtgtgacttttactgatccgattactgaggttaacaatgttattgctcaaaccgaagcacaggctagagcgcaaggaaagacttataaaaattatattattttgggacatctaggggtagatacaacaaccaaggaagaatggcgcggagacagtctcgctcaagcactggctaagaatagtctgctggctggtaaaaatgtcattgtacttgatggtcattcgcatacagctaaaacgcaaacctatggcaatgtgacctataatcaaacaggaagttatctcaataatgttggtctgattaagctcaattccaaggagatcctaagcaatgcgttgatttctgctcaggatgccaagacagtagcagctgaccccaatgtgcagatgatggttgatcagattgagactaagtataaagctgacagttctactattttaattgccaatagtccagttgaactcaatggcgatcgcatgaatgtgcgtgttcgtgagacaaatctggggaatgcagtggcagatgccttgcttgattatggacaaacggtcttttcacataagtccaatttagctgttactaatggtggtggtcttcgtgaaacaattgccaaggataagcctattaccaaaggagatattattgctgttttgccttttggtaatagcgttgcgcaagtcgccgcgacagggcagaatatcaaagatatgtttaccaaatctctaggttctattttacaagcagatgctaaaggcaagtctgttcttgacgaaaatggtcagccattgcttgagccaagcggcggtttcttacagattgctggtgctaaggtttactatgatactagcctagaaccgagaaaacgtatcctttatattgcaattttagacccagaaacaaagacctatcagcctctggatttgacaaaaatttactatctcgtcacgaatgactttttagcagcaggcggtgatggctataccatgttgggaggtagccgcgaagaaggtccatctatggacagtatcttcactgattatctatctcgtgctgatttgacgcaatatcgagtgattaaccctaattcgcgtagcatttccatatcatcaaccaaggactcagatggtgatggacagcctgattatttgcaattaattgctgataacaaggccactgttcctcaaaaggggtttgactctggtcaagacaagtcagaagttattaccttgtcttattcaaaaaattggagagcagaccaatccttactaatctctgctcttcatcagacagctccattagcagaaaaattttcttcctatcaggaaaaacaagaattgccattaactggcagctgtaattctgttcttgtgattttagctggcctttccttaacttcttatggcttgtacagtagctatcgtaaagcttatgggaaagaaaaataaagactatcactatttcttaatttcttaaacgcgtaaaaattccctcaattatttcgattgagggaactctttttaatgtgttttttgtttagtaatattgagaccaaaaggaactaaactttcggttttatttttaatacgtaccaaattttcacgatggcgtatgataatcaaactgcctgctgaaataacaattaagacaaacagaaaatcatagtcttttaaaagaaagtgtagagcaggaaaaatcaatacggtaataatagcaatactggcagcaatgacacttgataaggaaatcatgctggttagataaagagtaaagaagaaaatgaacaaaaggaaaataagatagaaaggagcaaaacctaataaaatacctgctgaagttgccacagccttaccacccttgaaattagcaaaaatagggaaagtgtgtcctaaaatagcaaaaaaaccaaacagcaaaggagaaatgtgggttactcctaaccacatgggcagcagagttgccagcgttccctttaaaaagtcaactgtaaacgttaataacccagcttttgggcctaagacacgaaaagtattagtggttcccatattgccgctgccatagtctcgtaaatttttaccgtaaaaatatttgccaatccaaagtcctgttgggatagatcctagaagataggctgcaattatcaaaataattagtttcataaaattattataacaaatcctttaaggaaaatctcttgattttcaaaaattactttgcaaaatttctaaaaaacttgtaagataaaaaagatgaaataatcggaggtcaactttggctaaaaagaaaattaatattaataattataatgatgatgccattcaggttttagaaggtttggatgccgttcgtaaacgtccgggaatgtacattggttcaacagatgggacaggcctgcaccatttggtttgggaaatcgttgataatgctgttgatgaagctctgtctggttttggtaatcaaattgatgttatcattaacaaagatggcagtataacggtagctgaccatggacgagggatgccaacaggtaaacatgctatgggtattccgactgttgaggttatctttactgttcttcatgcgggcggtaagtttggacaaggcggctataagacttctggaggcttgcatggtgtgggttcttctgttgtcaatgcgctgtccagttggttggaagttgaaattacacgcgatggtatagtttacaaacaacgttttgaagatggtggcaaaccagcaacaaccttggagaaggttggcaaggctcccaagtcaaaatcgggaaccaaggtcacctttatgccagatgccggcattttctccacgactaattttgtttataatactattgctgaaagacttaatgagtccgcttttctgcttaagaatgtgactttgaccctgacagatgaaagatcagaagagatagaacatgttgcctttcattatgaaaatggggttcaagactttgtagaatatcttaatgaagacaaggaaatcttgacaccagttatttattttgaaggagaagaagctgattttcaggtagaagttgctctgcaatacaatgatggtttctcagacaatattctctcttttgtcaataatgttcgtaccaaagatggcggaacgcacgaaactggactcaaatctgctattaccaaggctatgaatgattatgccagaaagacaggtttgctcaaggaaaaagataaaaatttggaagggtccgattaccgtgaaggtttatctgccgtcctttctatacttgttccagaagagcacctgcaatttgaagggcaaaccaaggataagttgggaagtcccttagcccgtcctatcgttgatggtttggtgtcagagcaattgacctatttcttaatggaaaatggtgaattagcttccaatcttatccgcaaagctattaaagcgcgtgaagcgcgtgaagcagcccgtaaagccagagacgatagcagaaatggcaggaaaaataagaaagataaaggtcttctttcaggaaaactcacaccagcccaatctaaaaaccctaaaaaaaatgaactctatctggtcgaaggagattctgccggtgggtcagccaaacaaggacgcgatcggaagtttcaggctattctccctttacgtggtaaggtactcaataccgctaaggccaaaatggatgatattattaaaaacgaagaaatcaataccatgatttataccataggcgctggtgccggtcctgatttcaaggttgacgattctaattacgataaaatcattatcatgaccgatgccgataccgatggtgcccatattcagaccctgctcttaacttttttttatcgttacatgagaccattggtggagacaggacatgtttacatcgctttaccacctctctacaagatgtctaaaggtaaaggagccaaagaagtcgtagaatacgcatggacagacggtgagttagaagatctccgcaaaaaatttggtaaaggagctatgctccagcgctacaaaggtctgggggaaatgaatgccgaccagctctgggaaacaaccatgaatcctgaaaatcgtacccttatccgtgtgactattgaagatctggcgcgtgccgaacgccgcgtcaacgtcctcatgggcgacaaggttccaccccgccgcaaatggattgaagataacgttaagtttacgctggaagagagtggagtgttttaagatggactatggcatttcgataaagatactgttgctcgtttttaccagaaatgtaggactattaagtcaacaaaattggtggataatgctctcagttctgatacctagcgttcttggcccgctttttgttcactttggtaaaaatatttttgataatagtaaaaagattataatatctggaaatgttatttcaaatataaataatcagtctggcatgaaggaacctataatttcaaacccaaaagtttattcaaattttatatttaatcatttgacagtggaaaataaaagaagtgtttcacaggcaataactgaaattgagttatacgatattaagaagcaagattaccttatacaagatatccaatacgacggtggcttttatgataaaaaccaaaaatttgttttaatagcttacaataatggcaatacagacgcacttatcaatggagatagtataaattattatgcttatgaaagtatatttcaagaaggacatttgattaaaaatcttcaattggaaaagactataataaaatcaggggatgtccaaagcttaattattgattcttttgttcagttttatgacctctttgaaacatatgataaacttcaagagttaaaaatcgttatagtagatggagaaagtaaagagcttgaaagcttattgttatggcttcattatgacagaaagaataaaaagtttgttaatcatcctagaggctttgctggagcccccattgaagatgttccactgcttgatttgactaatgatactaaaaagcaatcagctgactgtgttcaaaaagtttcagctggcgcaaatgaagttgattttacaattttagttgatagaacatgtcaattagagtataaaataaaattaaaaagtggtaagaaatcctttgaagataagaatacctataatcttattattagagtgcctgtttatgtccaagagcgaggtggtttttttggagatttttaccaatttttattagttaataaaaacaacttagagagttcattcaaatatgacaaggatttgattgcctctttaaataaagaattaatttttgataggtataaagccgctagaaaatttgcacgagtgaaaatctaaagcgtttgggattatcgaatctttcaaaaagatagttaaaaatgagataggtaggaagagacaatgtttagaaactctacttatctatggaaatatggaatagcaagttgggaagtctccgctataataaaaagttatttagtcacttgagggaattcaaaaaattttagacattagaatgagtcatggagtggtgtagatgttctctggtgcctccatcacttaggaaagtcttacaaaatttagaaaaaaaaataagaaaggaaagttcagttgattctttaaaactgaacacgggactaaatgtctaggaaaaaagataaatcttcctagatgctgaagcatcttcgtcagatttcctatttttctacgaaatttttcggcaagccgaaacgtccctttgtatcttaattatgtccaatatacaaattatgtcccttgaggacattatgggagagcgtttcggtcgttactccaaatacatcattcaagaacgggctttgccagatattcgcgatggtctcaagcccgtacagcgccgtattctttattctatgaataaagatggcaatacatatgataaaggttaccgtaaatcagctaagtctgtcggtaatgttatggggaatttccacccgcatggggattcttcaatttatgatgccatggttcgtatgagtcaggattggaagaaccgcgaaaccctgattgaaatgcacgggaacaacggttctatggacggtgatccgccagcagccatgcgttatacagaagcgcgcctatcagagattgcagattatttgctccaagatattgacaagaatacggtagcttgggcttggaactttgatgataccgaaaaagaaccaactgttttgccagcggcctttcctaatctcttggtcaatggtgcaacagggatttctgcgggttatgcgaccgatattccaccgcacaatttagcagaagtaattgatacggttgtctatcttattgatcacccatcagctaagctcgataaactcatggaatttctacccggacccgattttccaacaggagccattattcaaggtaaagatgaaattcgcaaagcttacgaaacaggtaaaggacgcgttgttgttcgctctcgcactgaaattgaaaatcttaagggtgggaagaagcagattgtagcgacagagattccttatgaagtcaataaagcagctctagttaagaaaattgatgatgttcgtcttaacaataaggttcctggaattgccgaagttcgtgacgaatctgaccgtgagggtctgcgcattgctatcgagctcaagaaagatgctgatgagcaaacgattctaaattatctttttaaatacaccgatttgcaaatcaactataattttaatatggtggctatcgataattatacgccgcggcaagttggcattattccaatgttaacgagctatatcgcccatcgtaaagacattattgttgcacgttctaaatttgacaaggaaaaagccgaaaaacgtctccatattgttgaagggcttattcgtgttatttccatcctggacgaggtcattgcacttattcgagcttcggaaaataaagctgatgccaaggaaaatcttaagattagctatgacttttcagaagaacaggcagaggctattgtcaccttgcaactgtatcgtttgaccaataccgatattgttactttggaaaatgaagaagctgaattgcgtgaacgtattacaactctcaatgctattattggtgatgagcgcaccatgtataatgttatgaagcgtgaactgcgtgaagtcaaaaagaaatttggcaatccacgtttgagtgaattacaggctgagacacaaaccattgaaattgacacagccagtctgattgtggaagaagaaacctatgtcagtgtcacacgcggcggttatattaaacgaacaagtccacgttcctttaatgcttcaacagttgaagaactcggtaagcgtgatgatgatgatgtcatcttcattcagaatgctaagaccacacaagaactgctgatttttactaatttaggcaatgttatttatcggccgattcatgaattagctgatattcgctggaaggaaatcggtgagcacctcagccaaaacattaccaattttgcaacggatgaagaaattctttatgttgatttagtggatcattttgaagaaggtacctattatgctgcaactcgtctggggcaaattaaacggtttgaacgtcgcgatttgacaccttggcggagttataagtctaaagcagtcaaatatgctaaattaaaaggtgatgacgatcaagttatcagaatttcaccaattaaattagatgatgtgatgctaattactgctagaggctatgcgcttcgtttcaatattgaagaagtacctattgtcggtcctaaagcagcaggggttaaggctattaacctcaaagagggggattctttggctgctgcctttattgccaatacggatagtatttatattttgacacaaagaggcagtctcaaacggatgacaaccaatcttatcccagtgactagccgtgctaaacgtgggcttcaagtacttcgtgagcttaagagtaaacctcatcgtgtctttgcggcaggaccagtcttctccgaagcagcaggggagattgacctatttaccactgtaggtgaacaaggacaagaagaaattctagaaattcaatcgcaaagtttagaaaaatacgaagttaatctggctgaactctcgctatcagaacggactagcaacggttcctttatctcagatactatctctgatcaaggagtctatgcagcaaaaatcaaaatttaagataacatttcttacaaaaagacaggagtcattaaacaatagataaggtttgttattttttaagaaaacagattgaaagatggagaaaaacataggatagaaagtcatacttacatagttgtacgactttttattctgctccattttatcttttaaagaaattttcagaattttatgaaaaaatacttgaaaattctagcaaaaagcgtacaatagaaaaaaacgaggaaagaggtattaaaatgacagtagatttagattggaaaaatttaggatttgaatatcacaaacttccatttcgctatatttcttactacaaagatgggaaatgggatgacggtaaactgacagaagatgcgactctccacatttctgaaagctcaccagctcttcattatgggcaagaagcttttgaaggtttgaaagcctaccgcacaaaagatggctctgttcagcttttccgtcctaatatgaatgctgagcgcttacaacgtacagctgatcgtctcttgatgccgcaagtgccaactgacaaattcattgatgctgccaaacaagtcgttcgtgccaatgaagagtatgttccaccatatggtacaggggcaacgctttatcttcgcccacttttgattggtgtcggcgatgtgatcggtgttcatccagctgatgaatatatctttaccatctttgctatgccggtaggtaactactttaaaggtggtttggctccgacgaattttcttattcaagatgattatgaccgcgctgcgccacatggcacaggagctgccaaagttggcgggaactacgcggcgagtcttttgccaggtaaggttgcccatgaactccagttttcagatgttatttatcttgacccagcaacacatactaagattgaagaagtcggttcagctaacttctttggtatcactaaagataatgagtttattacacctcttagtccgtccattcttccttctgttaccaaatattctctgctttatttagctgaacatcgtttcggcatgaaagccattgaaggcgatgtctgcgtagatgaattagataaatttgttgaagcaggagcctgcggtacagcagctgttatctcaccaatcggaggtgtacagcacggtgatgatttccatgtcttttacagtgaaacggaagttggtcctgtaacgcataaattgtatgatgagttaacaggtatccaattcggcgatgttaaagcaccagagggctggatatataaagttgatgactaaataattagcgagcttgctcttgcaagcttttatttttttgtgtaaaatacttgagaggtaagttatgcgtaaaaaagataagaagattgaaattcaaataagtgataagcaagttgaggcaaatgagacaaaaatggtcggttatcaattaacaattggaaacaaacttataggtgagattgctgagattgatgacaagtttgctgttatcaaaaatgctgcagttgttgatttccataaaaatttagaaactgctgttgaagctatcattcaaacctataatttgaatcactaaaaatagaaaaacgcttgattttagcaggagattatgataaactagtttttgttgtcactggaagggtagcgaagaggctaaacgcggcggactgtaaatccgctccttcgggttcgggggttcgaatccctccccttccatactcaggatacaaagattgttaaaaaatccgtatgaaaatagaaaactaatgaaccgttgtttacaacgctaggaagtttatctttttcactaggattttaggttgtgttcaacttagttttgccaattgttcttgagtctgtattatttaattttggggtatagccaagcggtaaggcaagggactttgactccctcatgcgttggttcgaatccagctaccccagtcagaggtattagaccaagtctaagaccgtcagagatatgcgtctagttgtttgtccttgcgggataccttgtgaaatatattgttatcaagagataaagagggtttatttcttgtcggaggtttttttagaatgaatgaatttgaagatttgctaaacagtgttagtgaagtaaatccaggcgacgttgtgactgcagaagtcttaactgtagatggagaacaagcaaaccttgttattgacgggacaggtgttgaagctgtattgacacttcgcgaattgaccaatgatcgtaatgctgacattaatgactttgtcaaagctggtgataaagtcgaggtgcttgttcttcgccaagttgttggtaaagatactgatacagtaactttccttgtctctaaaaaacgcctagaagctcgcaaggcttgggacaaacttgttggtcgtgaaggtgacgttgtgactgttaagggcacacgtgctgttaagggtggactttctgttgaatttgaaggacttcgtggttttattccagcttcaatgattgatacccgttttgttcgcaatactgaaaaatttgttggtcagcaattcgaagcaaaaatcaaagaaattgatccttcagaaaatcgctttatcctttctcgtcgtgatgtggttgaagctgcagctgcaaaggcgcgtgaggaagtcttctcaagacttgctgttggtgatatcgtgactggtactgttgctcgtttgacaagttttggtgcttttattgaccttggtggtgttgacggacttgttcatattactgaattatcgcatgaacgtaatgtttcaccaaaatcagtcgtcactgttggtgaagaaattcaagtgaaggtgcttgctattgatgaagaagcaggccgagtttcactgtctcttaaagcaacaactcctggaccatgggatggtgttgaacaaaaacttgccgctggtgatgttatcgaaggcaaagtaaaacgcttgacagactttggcgcttttgttgaagttcttccaggtattgatggtttggttcatatttcacagatttcacacaaacgtgtcgaaaatccaaaggatgttctttcagtcggtcaagatgttactgtcaaagttcttgatgttaatactgctgatgaacgtgtctcactttccatcaaagcgcttgaagaacgtccagctcaggacgaaagcaacggagaaaaacgtcaatctcgtcctcgtcgtcaaaaacgtcaagataaacgtgactacgaacttccagaaactcaaactggattctcaatggctgacttgtttggtgatattgaattataatctataatcaatgggtagaaattgaattttattcccttctaaatcttttttaagatttagaaggtttttatatttcaaggaaattttcatacatttacagctaaattaatgaaactatggtataattattgtgttatccacctttagtgtaatggatatcacgtaagattccggttcttgagatgggggttcgattccctcaaggtggattaggtaaagatgaaagcggtgcttttacaaaaagtagttttgatacctgatttttgcagacttattattagttaacatcaaaagtaagaacattaatcttatttgttactaaatagattttaaaactattatgtttatcgactatgtgacaagagaagcataagctaactactgcctttcggttgagattatccaaacagaagtttagaaatatttttattgccgtttttgcttttactttaactaacttaaagttttgatgattataaaaaaagcagtctatcaaagctgcttttacttatgaaataaaaattctagtaacttactaccgtatatccagaaataactataacaaataatagacaatggtttggtgatgaccataatagcagtgaagcgcttaagactcatgcttgttaaaccagtaatcattaccataatatcagcaggcgacacaggagaaagcatacaaaaaatgaatagtttttcataagtatcactttccagtttggcttcgtatttgaaaaaagtatcttctttcataaaaagcaaaataaacttacgacctaaccactttaccagaaggaagagtaagacactcccaataataataccgatgtaatttaaaatgaaaccaagccaagtaccaaaaataagaaaaccagcaacagtagtgacgccgcctgggataacagggaaaacaatttggaaaatctgaacgagaataaagattaaaggacctaaaactttgtgatggtgtacaagatccttcaaagcgttgctgtcatttaaaatgcctaatttataaaaccagataactaaaatgactgaagcaattaaggctaaaattcctaaagcctgaatgattttttgcattaaaatataacgtttgcttaatttcactttcatagtattatgataccatatctaaaatattttttgctatttttcctttattttgctatactattttcacacaatatgtactggggtcgttacggattcgacaggcattatgagacctattttgcgactcatctagcggatgtaaaacgccagttaaatataactgcaaaaaatacaaattcttacgcagtagctgcctaaaaaccagcctgtgtgatcaataacaaattgcttgtgtttgttgattggtcttattgttaacaagctacgttagaactgagtcaggctgttctaaaagagttctactgactcgcatcgttagagtttgagttatgtattgtaacggtgttaaataaacacataacctatagttgtagacaaatgggttagcagatgtttggacgtgggttcgactcccaccggctccattaaacgcataagcgtttttttatttaaagtttatgtttaaagggaagatgagtatgaaaagaacaaagaattggcttttagtgtttttaacagtgactttctgttttctaatgctaggctgtcaatctaaagaagacaaagagggagggaccaagccttctaatgaggccgcattaacaaaaacagaaaacttagattttcgtttaagtttcaataaaatcaaagtgacaactgatcagaatcatttttctggtggaacaagtattgaacagttgaaacaatggtttggtgacccaaataaaagtgagcaaagaaatgcaggaaacatcactttagatagctatacctgggtgaaagatggtgctgttattaatgcccaattgtataagaatagtactgtggcacgttcaatttccaatttttctttcagtagagaggctaaaattggcaaagaagattatgatgaactgaaaatcggtgaatcttataaaaagattgttgaaaaattgggtgaaccagatgtgctgtcccagtcaatgtcatcagacaaagaagaaatgcagactgtctggtctagtggcataaaaacaaagtcatcttcggcaactattgaactctattttgaaaatggtcttctaaaaaataaaacacaaaaagatttggaataataaggaatactagagcataaaaactttttgatattatcctctagtatttttattattggatattcagtttatttttgataatataatgtgtgccaaaatagaaaacgagaccatagacaattagaagaataatatttaaggtgagatggtaacagtctagaaaactgttattcgtactcattaaactaataaaaccgttattgccagttccaataagaatatttaaagtgctgcgaacaaagctaataaggaaataaaaaccgaaagctagtagaccgcggtaatcttgaaacagttgtcctaatgcgatagcgaagtaaatttctaagatactggtagttatccctaacaaaaaagaaagaatagctaatataacttcaggcttggttagaatgttaacagcttgtgacaaagtttctgtgaaataagttaaaaaaggccctatagtaagcgatggaaggattaataagaaaaaactaaggatgaaaatcaaaccactacaaatcgtgcaaataaaagcaacaaacagtttagttaagagagtcttatgtgtggaaactggcagggttaacgtaaggtagccttctcttccaaaaatattattgtaaaatcggcgaataataattagcagtgttgcgataaaaatagcaataaaaatagctaacaataaggaaaataaaataaaagctagaattccttgtgatcttgaataaaaattagtactgtagctagaattagataacttagaggctttaagattagctctgatccaaataccggcagctaaagaaatgaaagcagctagtccatatagaccgaaaaaccaaattccaactgatttaaattcatattttaataactttccaaacattttctcctcctaggctctaaatttctctctaaaaatgtgatcgattgattgtgcgtattgttcacgcaaatcatctacattttcttgtaaaacaatctttccttggttgataaaaataacttcatctaaaacctgctcaatatccgaaattaaatgagttgaaataagaacagatgcatcttctgagtagttattaataattgtttttaaaatataatcacgtgcagctggatcaacaccaccaatgggttcatccaaaatgtaaagttttgctttgcgactcataaccagaataagctgaaccttttccttgtttcctttagaaagattttttaatttttcgctttgagcaatggctaaatcttccagtaattgttcggctttttgcctatcaaaatcaacatagaaatcttcaaatagttttaaaatgtcatggaccttcattttatcacttaaatagctggtatcgggaagataggaaatgagcgattttgtttcaggacaaggtctgagtccgttaatcacaatttcacctgcagtaggttgtaacagtccattagctaatttaatcagtgtcgtcttaccgcttccatttggtcccaacagtccaattattttaccttttggtaattttaaagaaatatcatcaagagctagcttgtttccaaacttcttagtaatatgatgtaattgtaataagggcagttgttctgtcatttcgtctctcctttaatatattggtccagtatagtagttaaacgatctttgctaaagccaattgttgtcatcttgttgataaagtcttcaagttctgtttgagctaacttgtgtctttcttcttcaattaactgctggtcctttgtcacgaaacgtcccgaagttctaactgaaaagaccatcccttcttgttcaagtgatgtaaaagcacgttgcatagtattaggatttacgccagcttcttctgctaaatctctaactgtggctagttgttggccgggtttgatttcttgactgataatttgcattttgatatgattggcaatttgaagataaataggggatttctcattaaatttccaagccattttttctcctttctaaagtgcagtgtataattgtgttatatatataatacaattatagtaaaatattgtcaagtggtaaatttagactgatgagatttagtagaattaaatgaaagagtaagaggattttaaggatttgtagtataataaaagtaagtagatcttaaggagacagaagtgtttgcacaattagatactaaaaccgtttatagttttatggatagcctgattgacttaaaatcttatattaagaaagctaaggagatgggctattcgcatattggtattatggatagagataatctctacggagcttttcattttataaaagaagctcaaaaagaaaaactagtccctattcttggtcttgaactggatttatttttatctaatgatttgacgaccgtatgttttattgctcaaaatacaattggctaccacaatctcttaaaaatttcaacagccaagatgacaggtcaacagcttttctctgatattgaagaatttatggatggtcttgctataattgttccttattttgaaggaattgatcaaatggattttcccttttctttttatattggcgtcagaaaagatactcctcagctggattttaaaagggacattttacctttacatacagtacgttattatgataatgatgatacagagaccttacaaatattacatgctattagagataatcttcctttaagggaagtgcctcctgtttctaaagatcagtatctgttttctcaggaagagatggaacaaatttttgaggaacgttttccacagagcttgttaaatttagaaaagttggtcgccaatgtttcttatcagtttgatactgatttgaaattgcctcgttttagtcgagataaacctgctgttgtggaattaaaagaattagcgcaaaagggacttatagaaaaaaaacttttgagtgatgactatcaaaagcgattatctgatgaattggctgtcattcatcaaatgggctttgatgattattttttgattgtctgggacttactgcgctttggccgttcccagcattattatatgggaatgggacgtggttctgcagcagggagtcttgtggcttatgcccttgatattacaggtattgatcctgttaagaatgatttactttttgagcgttttcttaatgaggaacgctacagcatgccagatattgatattgatcttcctgatatttatcggagtcagtttttaaattatgtccgtgatcgttatggttcaacacattcagcacaaattgtgaccttttcgacctttggtgccagacaggcaattcgtgatgtttttaagcgttttggagcgactgaatatgaactcagtcaaatcactaaaaaaattagttttcgtgataatttgacaagtgtttatgacaaaaagattgcttttcgccaactcattaatagtaaattcgaatatcagcgtgcgttcgaaattgcgaaaaaaattgaaggaaatcctcgtcaaacttccattcatgcggctggaattgtgatgagtgatgataatttaacagatcacattcctctcaaaacaggtgaagaaatgatgatcacgcaatatgatgctccagctgttgaagctaatggtcttttaaaaatggactttctcggactgcgtaatcttacttttattcaaaaaatgcaggaaaaagtagcacaagattatggccgtgccatagatatcagagctattgatttagaagataaagagaccttagcactttttgccgctggagataccaaaggcatttttcagtttgaagcagccggagctatcaatcttttgaaaagaattaaaccttctcgttttgaagaagttgttgcaactaccagtctcaatcgtcccggtgctagtgattatactgaaaattttattcgccgaaaatatgggcaagaagaagtggatttgattgattcatcaattgcttctattttaaaatcgacttatggtattatgctttatcaggaacaagtgatgcaaattgctcagatttttgctggttttacattagggaaagctgatttattacgccgtgctatgtcaaaaaaaaatactgttgaaatgcaaaaaatggaaaaagattttttgcagggtgctgatcagttaggacgagatctaaaagttgcccaagacttgtttgcaagaatggctaagtttgctggttatggctttaatcgcagtcatgcctacgcatactcagctttagcattccaaatggcttatttcaaagtacactatccagcggtgttctttgatgtcatgttaaattactctagcggtgattatctcagcaatgctttagagactcattttaaattaggacctttgtccattaatacgattccttattctgataaaattagtcatggtcagatttacttgggtttaaaaaacatcaagggtttaaatcgtgattttgcctattggattattggaaaccgtcctttttctagtattgaagattttttaatcagaatacccgaaaagtatcagaaaactgagattatcactcctttaattcaagtaggcctttttgatcagtttgataaaaaccgccagaaaatcgttgtcaatctagaacacctttttacttttgtcaatgaattagggagtttgtttgctgattcttcctataattggatagaagcgcaagattataccaatgctgaaaaatatcagctggaacaagatatcattggtgcaggagttagtccgcatcctctaatagaaattgcaaagcactccagcagacatttaattgctctgactgacctcgttgaaggaaatgaagctaccatattagctcaaattgagtccattagaattattcgaacgaaatccagaggcgagcaaatggcttttctaagtgtgacagatactaagaagaaattgaatatcactctttttccagagacttatcaaaagtacaaaaatttcttaacagaaaaaacgatttattattttactgggaaaatacaggagcgtgataatcaattgcaaatgattttacatcaattagactctgcctcaacagaaaaatgctggattaagttacaaaatcatgattgtgatagagagatatcagaaattttagcagcttaccctggaaatattccagtagttttacattactcaaatactaaagaaactttccaaagcagccgctattttgtcgctaaggatccagaattgcaggaaaagttggcttattatgctctgaaaacgctttttcaataaaaagtatgttcagaaactaaacattttacctaggttgtgctataataataacgttaatttaaataaaggagtatcaagcaaaatgaaacgtattgctgttttgaccagtggcggagacgctcctggtatgaatgctgccgttcgtgcagtcgttcgtaaagcaatttctgaaggaatggaagtttgcggaatcaatcgtggttatgctggtatggttgaaggagatatcttcccgcttgacgctaaaggtgtatcaaacatcctttctcgtggagggacatttctccagtccgcacgttaccctgaatttgcaaagcttgaggggcaattaaagggtatcgagcaactcaaaaagcatggcattgaaggagtcgttgttataggtggcgatggttcttatcatggtgcgatgcgcttgactgagcatggttttcctgctgtcggtcttccgggtacaattgataacgatatcgtaggaactgattatacaattggttttgatactgcagtaaacactgctacggatgcacttgataaaattcgtgatacctcatttagtcacggcagaacttttgttgttgaggttatgggacgtaatgcaggagatattgctctttggtctggtattgctgccggtgctgaccaaattattattcctgaagagccctatgatattaaagaggttgtcgccaatgtgaaaaatggctatcttagtaagtctaaaaaccaccatctcattgttcttgccgaaggcgttatgcatggtgaagagtttgctgctcagatgaaggaagcaggagataatagtgatcttcgtgttaccaaccttgggcatatcctgcgcggtggtgcaccaactcctcgtgatcgtgtgattgcttcatggatgggagcccatgccgttgaattgctcagggaaggaaaaggcggtcttgccattggtattcaaaatgaggagttggttgagcatccaattcttggatctgcggaagacggtgcactctttagtttaacagaacaaggcgagatcgttgtaaataatccgcataaagcacgtcttgattttgctgctttgaatcgtgatttgtccaactaagcatgattaaggtcggttagattataagtttttaacagtcaattgttgatttaaataagggagtttcataaaaatgaataaacgcgtaaaaattgttgcaactttaggtccagcggtagaaatccgtggtggtaaaaaatttggtgaagatggctattggggtgaaaagcttgatgttgaagcttcagcagcaaaaattgctgaattgattacagaaggagccaatgtttttcgttttaacttttcacatggtgaccatgctgagcaaggtgaacgtatggcgactgtacgtcgcgcggaagaattggcacgtcaaaaggttggattccttcttgatactaaaggacctgaaatgcgtacagaattgtttgcagatggtgtcaaagaatatgaatataagactggtgataaacttcgtatagcaactaaacaaggcattgaatcaactaaggatgtcattgctttaaatgttgcaggcggtcttgatatttatgatgatgttgctgtcggtcagactattcttattgatgatgggaaacttggccttacagtaaccgctaaagatattacgactcgcgagtttgaagtaaccgttgaaaatgatggtattattgctaaacaaaaaggtgtcaatattcctaatactaaaattcctttcccagcacttgctgagcgtgataatgcagatattcgctttggtttggaacaaggtcttaactttattgctatttcttttgttcgtactgctaaggatgttaatgaagttcgtcaaatttgtaaagaaacaggtaacgaacacgtaaaactttttgctaaaattgaaaatcaacaaggtattgataacattgatgaaatcattgatgcagctgatggtatcatgattgctcgcggtgacatgggtattgaagtgccgtttgaaatggttccagtatatcaaaaaatgattatcacgaaagttaatgcagcagggaagtcagctatcacagcaacaaatatgcttgaaacaatgactgacaaaccacgtgcaacacgttccgaagtctctgatgtctttaatgctgtcattgatggtactgatgcaacaatgctttctggtgaatcagctaatggtaagtatccagttgaagctgttcgtaccatggcaacaattgataagaatgctcaaacacttcttaatgaatatggccgtttgaattcagataatttgccacgtaccaacaagactgaagttgtcgcttcagctgttaaagatgcgactaaatcaatggatattaaattggttgttacaattacagaatctggtaacacagctcgtttgatttcaaaataccgtccggatgcagatatcttagctttaacatttgatgaaaaagtccaaaaatcattgatgattaactggggagttattccaatcttaacagaaaaacctgcatctactgatgatatgtttgaaattgcagaaaaagcagctcttaaatcaggtttggtagagtctggtgacaacatcgttattgttgctggtgtaccggttggatctggtggtaccaatactatgcgtgttcgtaccgttcaataaaatgaatttaagtttaagtgtgaaagactttcaatcttttacactttttatttttaatatgattgagatatggaagcttttcttatcgtattgattgatatattcttagtcgtattttgctcaacttttgttgcgttctgagcttactttattctactttagtataaaaaaagacaaacccaaaaacctatagttataatgatcatttttagtttctaccacctttttcttggcatttcttcgttttattgttagactagatataatcttataaagaaaggtaagaaattatgggattactttggtcactaatagtaggagcacttattggagcaattgcaggtgctattacgaatagaggaaaagcaatgggttgtattgctaatatttttgcaggattagttggttcttgggcaggtcaagctttgtttggcagttggggacctagtttagctggtatggctcttcttccgtctattctgggagcagtaattgtggtagctgttatttccttcttttttggtgaaaattaaggaatacttatgataagtcttgctttttttcttctttaaaaaatgctataataagaccaataaattaaggagaaatgaatggttaaacgtgactttatcagaaatattcttctggttctgctagcagttcttgctttgcttttattaagagtgtttgtcttttcaaactatcgggtaaggcaagcagatgctaataactttttgaaatcgggagatctcgttacgatcacaaagaatgaaaagcctaattataaggattttgttgtctataaggttgctggtaaggatcgtattggccgtattattggtaaaccaaaagatagtgttacttatatggatgatattttttaccttaatcataaggctgaagaccaatcttatattaatgatttaaaaaataaatatcatacaaaaaatggagaaaatctttttacttctgatttttcaatttctagtattacaaagggaaaataccaaaaaattcctaaggggcaatacttgattttaaatgataatcggacaaataagaaagatagtcgaacatttggtttaattaagaaatctcaaattaaaggagttgtcacttttaggattttgccgctcaagaaatttggatttgtttcgaaagagtagtacagctactctttttttaaatgtcaaaaagactataccaattttcttgttgactttatttaaataaagttatatactggttttgttgaattttggctgtcttattagactataccaattataaaaaattaaggaggaagcagtaaggttttcttactactaatgaagaattatgtgtggtattgtaggtgttgtcggcaatcgtaatgcaaccgatatcctaatgcaaggattggaaaaattggaatatagaggttatgattcggcaggaatatatgttattaatcaacctgaaaatggacgtttaattaaatcagtaggacgaattgctgatttgcgagctaagattggtattgatgttgctggttctacagggattggtcatacacgttgggcaacccatgggcaagcgacggaggaaaatgctcatccacatgcatcggctacaggtcgtcttgtcttggttcacaatggtgtcattgaaaattatctccaaattaaagaaaattatttggcaggacataacttgaaaggtgaaacagacacagaaattgcagttcatttgatcggtcaatttgtgacagatggtttgtctgtacttgaagctttcaagaaggccttgcatatcattgaaggttcttatgcctttgctttgattgattcgcaaaatccagatattatttatgtggctaaaaataaatcaccacttctaatcggtctaggtgaaggctataatatggtttgttcagatgccatggctatgattcgtgaaaccaatcaatttatggaaattcatgataaagaacttgttgttttaacaaaagatacgactcaagtatcagattatgatggcaatcctgttgaacgtcaagcatatatagcagaacttgatttatcagatattggtaaaggaacctatccttactacatgcttaaagaaattgatgaacagccaacagttatgcgtaaattgatttcaacttatgctgatgaaaatggtaagttaacagttgatcctgctattgtgaaatctgttcaagaagctgatcgcatctatattttagctgccggaacatcttataatgccggttttgcctcaaaatcaatgattgagaccttgaccgatacgcctgttgaattagggattgcatcggaatggggctataacatgccattattgagtaaaaagccaatgttcatcttgttaagtcagtctggagaaacagctgatagtcgtcaggtcttggttaaggctaatgccatgggagttccaagtttgacaatcacaaatgttcctggatcaaccttgtcacgtgaagcaacttataccatgttactacatgctggacctgaaattgctgtggcatcaaccaaggcttatacagcgcaaattgctgcccttgctttcctttcaaaagcagttggagaagccaatggtaaaaaagaagcgctagaatttgacttggtacatgaattatccattgtcgctcagtctattgaagctagtctttcggagcgagaagttattgaaaagaaggttgctaatcttttagcaacatcacgtaatgctttttatattggtcgtggtaatgactattatgtggctatggaagcatcactcaaattaaaagaaatttcatatattcaatgtgaaggctttgctgctggagaattaaaacatggaaccatttcccttattgaagagggtacacctgttcttgccttgatttcatctagtgagactgttgctgctcatacgcgcggaaatatccaagaagttgctgctcgaggtgccaatgtcttaactgttgttgaagaaggtttaaataaggaagaagatgatgtggttgtcaatcaagtccatccttatctttcaagtatttcaatggttattccaacgcaattgatcgcttactatgcctcacttcaacgtggtcttgatgttgataaaccacgtaatttggctaaagctgttactgttgaatagaactaaatcttaaaccaaagaaaaatctacttgatttttctttggtttttttgggctgttttaaaatcttgtattcacagaaaatattttaatgtatgagataagagataagtgttagcttagtaaaagcaaccgtaaagtcacataaaagaacaaattccactttcgctgtgataaaacgaatgttgaccatcagaggaaatatatgaaagagttgagacattcagtttgaagtttaaaaggaaacttgaggaatgctgctgctttttttcgtctctattacctaaggaaactgttaaaaaagttatatattcaagtttttaacatgagaaaaatattagtgataaaaaagtcagtcttagtcaggctttgtcaaatcctattcttccgcttagaataacaaattttggcaaaacttttgtgccaaaatttgagttttattagaaaatgaaaaatgttacagtagttttagaataaaaaggaggggatttctgatggaacgaaaatcttcattgaaggttcgggtacaaaaactcggaacttcattatcaaacatggttatgcctaatattggtgcctttattgcatggggggttgcagcatctctgtttattgcaacaggttacttacccaataaagctttagataccaatgttgttggaccaatgttgaagtatgtgttacctcttttaattggttatactggtggttacaatattcacaaacagcgtggtggtgttatcggtgctattgcttcctttggtgccattgcaggttctacagtaaccatgttcattggtgctatgattatggggccattatcggcttggattttaaagaaattcgatgaaaaagttcagccaaaaatcagaactggttttgaaatgttggtaaacaacttttcacttggtttgattggttttgctttgatggtcttggctttctttgttattggaccagttgtggctcagttaacagaatgggttggtattggtgtagaagcgattgtcaaagttcaccttttacctttagcaaacttaattattgaaccagctaagattctcttcttaaataacgctcttaaccatggtatctttacgccattaggtacagagcaagtggctaaagttggtaaatctgttctcttcctattggaagctaatcctggacctggtcttggtgtgctgattgcttatgctatgtttggcaaaggctctgctaaatcttcatcttggggtgctatgattatccatttctttggtggtattcatgaaatctatttcccatatgttatgatgaaaccggctatgttccttgctgttattgctggtggtttgactggtacctttactttccaaacactgggtgcaggtttgacagcacccgcttcaccgggttcaatcatcgctatcatgggaatgtctcctaaaggttggggacctcacttagttgttcttgctggtgtctttgcagcagcagtggcttccttcctagtcgcttccattatcttgaaatctgataattcagatgatgattctctggaaactgcacaagcagtgacacaagcagcaaaggccgagtctaaaggtcaagcagtcactgaaccaaacctccattcagatattacaacagacaatattcatcaaattatctttgcttgtgatgctggtatgggaagttcagccatgggcgcttccatccttcgagataaagtgaaaaaggctggtcttgatatttctgtgagtaaccaagccatttccaatctgcaggatacagctaatactttaattgtgactcaagaagagctggcagatcgcgcgggacaaaaaaccccacgagctgttcatgtagcggtagataatttcttagctacttctaagtatgatgatattattgctagtttaacaaatggcaaagctagtggtagtgaaaatgcagcgcattcaacacaagcagatagtgcagaaattgatcttaaccaaattgatgcggtcgtttttgctcatggtatagctaaaggttcagcaacgatgggacaagaaaccctgcgttcaatctttaaacagaataatgttaaaattcctgtttcaactgcttcttatgctcatttaagtgactacaatgctaaaaatattctacttgtcacaacaattgctcagcaagggcaggcacagcaagcggctcctaatgcacaaatacttgttgtggatagccttgtgacaacaccagagtatgataagttagtcgccagaatgcataagtaaaacgcatcagaaagtagtataatagttttatgctattaacaaagagagaaaaacacttattagcagctttccaaaattatgggaagctgtcgcttaaacagatgatagatttgcttaaggtatctcagagaaccgtttatcggacaatttctgatttaacagatagccttaacacgattaatattagcatcatcaaagaaaatcaaaactattttctcgtaggagaattagctaatctggctagtattattagtctagatacttatgaacagtatgaacgtttgaatctcattacctataagttattgatgagttttagcagtatcacaaatgagcagctgcaggaggaatttaatgtttctaatgttaccattattcaagatattgctgaaattgaaaagcgtttggcagattttgacttacggttagatcgtaaaaaaggttaccgtttagtaggaaataaaaacactttacgacgtttattggctattttattaactaataacctttcgatttctgattttggggcaggagcatatggtcattttgaagtcttagataaggcaaaattagaacttgcgaagcaaatctttcaatcatcacaagaagatctacctgatttagatgctaagatgagtgagtttttcatcattctcttagccttatcaggttggcgggacaatgaagcagttggacacagtattagcaaagcagctcttgatttttcacagaaagtttatactgaattttcacagaaaaccaatcaattttacagtattcaagagattctttattatgccagtattttagatgaactggttattaagagacaggaaacgccgctttttcatgaaaaatttgacagtgcttttttctataatatttcaaatttgattgataaagtatctctttatactaaaattaattttgctaaggataaaacactctttcattttctgtttaatcatattcgcttgaatttggctgtccctcaaatttttgaagacaagtcaaataatacgattgctcatgaggttgttcaaggcaatgaatatctacatcgtgttgttagtcttctggttcaggatatttttccgaagtatttgcaaaaggaaccagagtatgaattaattaccttacattttgcttcaagtctgcgccgcagtccagatatttatcctattaagattttacttttaacagatgagcgtcccttagcgagagaacttctcatcacacgtattaaaaccattgcaccttttgttgataaggtagttgtcaaagaattggctcagtatgaaacaaaggataaagattattataattgtgtcttggcaaccaagcctttagtggataaggcagtcaaaatagtttctacttatcctgatgcaaaagaaatgctgcaacttcaagattatttacagaatgtacaggcccatcaaaaaatcatcattcgcgatgagcagacaaataggcaaggttataatcttcaaaattattttttggctacacaacaacttttacaggaattttcttatcaagagattgataatcctgctgattttgaaacaagtgttccaaaaattatggagactattgctgcagtttcagataaaacttatctgtccagtaagttattaaaacgttttgctgtcagtcccttggctattccagagactcatttggctcttttgcatacacagtcaagtaaggttataacgtcttgttttaaaatttatgatttaaaaagacctgtaacagctctgtccatgaattacgaaaaagagacagttacaagaattttggttatgctgacacggttagatgaaacaaaagaaatgagagatttaatgacggctatcagtcagtctatcatcgaaaatcatctttatacagaaatttacaagacaggtaataaagatattatttatcaattattgaatcaaatatttacagaaaaaataaagaaattggagacctaagatggaatttcaaaaagatttaattaaattgaaccaacattttcccgataaggaagctgctattcgtttttgtggacagctcttagctgatggtggttacgtagaaccagcttatattgacgccatgattcagcgcgataaagaactctctgtttatatgggaaatttcattgccattcctcatggaacggacgacgctaaaaaggatgttctcaaatcaggtatcacagttgttcaggtgccagacggtgttaattttggaacagaagacgatccgcaagttgcgacagttttatttggcatcgctggaattggtgatgaacatttgcaaatcattcaaaatatttcgattttctgtgcagatgttgataatgttgttaagttagctgatgctcaaacagaagatgaggttgtcaaacttttaagtcaagtcaattaaaaggagtttttaatcatgaaaaaagcagtacattttggagcaggcaatattggccgtggctttattggacaaattttatttgaaaatggctttgctattgattttgtcgatgttaacgataaaattattaatgctcttaatgaacgtcattcttatgatattgaaattgcagaagatgggaaacgtcacattacagtttctaatgttgctggcattaataacaaggaaaatcctcaagcagtcattgatgctgtggctgagacagagttgattacaaccgctattggccctaacattttgccttttattgcccaattgattgccaaaggtattgaaaaacgtcgtgaaagtcagaatcaaacgccacttgatatcattgcctgtgaaaatatgattggtggctctgcctttctctggcaggaagtgcagaaatacctcagcgctgatggtttagcttttgctaaagattatattggctttccaaatgctgctgttgaccgtattgttccagctcaggttcatgaagatcccctctttgttgtggttgagccattttcagaatgggtagtcgaaactgctgctatgaaaaaccctgatttaaaattgtcttcagttcactatgaagaaaatttggaaccattcattgaaagaaagcttttctctgttaattcaggtcatgcaacaacagcttatacaggtgcttattttggtgctaagacggtcctagaagcacttaaagaccaacaagttaaagagcaagtaaaggcagttttaggtgaaattcgccagcttttaatggctaaatggcaattcaaagagaaggatctgaaagtttatcatgatattattatcagtcgttttgaaaatccttatattgtagatgatgttactcgtgttgccagaacaccaattcgtaagttaggttatgatgaacgctttatccgtcccattcgtgagctgaaagatcgtggtttatcttatgaatatcttttgcaaacagtggcttatgttttccattacaaggattcaaatgatgaacaaagtgttcaacttaaaatgcttctacaagaaaagtctttaaaagcagttgttaaagaagtaacaggattgacagatgccgctttgattgaagaaattgttgccagtgttgagtctttagattaagggaaactcttataattaaaagaactagctcttgttctgcgttttctataagttagacagtatacttaactcatagagtcagtacaagcagctagctttttgttgtgataggataggacttgccaactgataaaaactcaggtaaactgttaatggtaatcaaaataaaaggagtttatatgtctttacctaattgtcctaaatgtcagtcggagtatgtctatgaagatggtattctattggtttgtccagaatgtgcttatgaatggaatcctgcagaagttgagaaagaagaaggacttgttgttattgatgctaatggcaaacaattagctgatggtgatacagtcactcttattaaggatcttaaaattaagggggctcctaaagatttaaaacaaggaacacgtgttaaaaatattcgccttgttgaaggagatcacaatattgattgtaaaattgatggctttggtgctatgaaattaaagtctgaatttgtgaaaaaattataagagtagagcaagttgaactgtctatcttagaaacaatcaattaatgaaggtggttcattcttgttcttttttggtgatacaggaatctctgcttggttttatgcttatctttgaatgaaaattcaattccatctataaaattttctgaaaatttgatataataaaaacgattattttttgaggagcaagtatgtcttatatatcagaagttttaccgagtcttttagatggggcgctgattactttacaagtcttttttattgttattctcttttcaattcctttaggagctatattagctttccttatgcaggtaccttttagacctttacgttggctgttaaatctctatgtttggattatgcgtgggactccgctccttttacaactgatttttatttattatgttttgccaagtgcagggatcacttttgatcgtatgccagcagctattttagcttttactctcaactatgctgcttattttgcggaaatcttccgcggtggtattgaggctattcctaaagggcaatatgaagctgctaaggttcttaaattaagtcagatacagactgttcgctatattattttgcctcaggttgtcaagattgttttaccgagtgtctttaatgaaatcatcaatcttgttaaagattcttctctagtctatgtacttggtgttggtgatttgcttttagccagtaagacagcggccaatcgtgacgctacattagcaccaatgtttattgccggcggtatttatttgattttaattggtgttgttaccattttatcaaaatacgttgagaaaaaatttagttattataagtaaggtgaatcatgttagagctaaaaaacatttctaagcaatttggtcagaaggtgatttttaatcattttaatctaagcatccctgaaggtaaaatcttatctttggttggaccatctggtggtggtaaaacaactttgttgcgcatgcttgcagggctggaaaaaattgactctggtcaagtcatctatgatgatgaagttattgctattgaacatttgggacatcgcaacttattaggttttgtttttcaagactttcaattatttccgcatttgactgttttagataatttgattttatcacccataaagtctatgaatgtatcgaaagaagaagcgatacaaaaagcacgtgatctcttaaaacgtttaggattagaggaacatgaaaacgcttatccttactctttatcaggcggtcaaaaacagcgggtagctttggctcgtgccatgatggttaatcctaaaattatcggctatgatgaacctactagtgccttagatccagagttaaggcaggaagttgaaaaattaattttacaaaatcaaaaattgggtatcacacaaattgttgtgacacacgatatgcagtttgcccaaaatatttctgatgagattgtaaaaatcaatccaaaataaaaagaaagtttaggtattaagatgacattcaaaaaagcagtaacagctcttattacttttctagcagtagtaactttgacagcctgtggtaaaaaaggagctgattcccaagataattggaaaaaatttgagtcgaaaaaatctgttactattggttttgataatacttttgttcccatgggatttaaagacaagaatggtaaaaatgttggctttgatattgacttagcaaatgctgtctttaatgaatatggtatcaaggtgaaatggcagccaatcaattgggatttgaaggaaacggagctgaaaaatggtaaaattgatttgatttggaatggctattccaaaactagggaacgtgcacgcaaggtatcctttaccaagccttatatgaaaaatgaccaagtacttgtcacgaagaagtcatctggcattacgagctttgctgatatgaaaggcaaagctttaggtgctcagtcaggttcatctggctatgatgctttcacagctaatcctaaaattttaaaagatattgttaaagataatgatgccagtcaatatgaaacctttacccaagccttcattgacttaaaaaatgatcgtattaatggtcttttaattgatcgtgtttatgccaattattaccttaagcaggaaaaggaacttgataactataatattatcaaaggaaaatatgccagtgaagatttttcagttggagtgcgcaaatctgataaaaccttgaagaagaaagtcaatcaagctttcaaaaagctttacaaaaatggtaaattccaagcaatttcccaaaaatggtttggtcaagatgttgcttcaaatgcgatcaagaggtaagcacaatcactcttttttaaaatagttaaaaaacgaatgatttcagataaagcttattggcttatctaaagtcattcgtttttgattattttaggttttttaattatttactatattgtaattaaagaataggcgagacttgatggtaaataatctgccatctctcatgccgacgccaaagactggtatgtcggtagctatctaattcgtaagtaatgagtttagtcttttggctgatggaaagcatcttaaaagagttaaaatgttttgcttcacttgagcgaccttttaggaatgctgcttttgcattaacatgtcctttctcatcaattaagataaaagaatctgttaggagctgttcatagtctgaagtcttagttaaaatgattttctcatatttataaagtttatgatagacattttcaaaaacttcatcttccgggatagctgctggctcaacatggatatcaatatcataaacattaaactgctcatgtaagagtttttcgactctttctgtaatagcatgactttcatagacagataaatcagggttcatttctaaaaccaaatctaaataaacattgctgccataagtccgtccgcgttgagattttacggcagaaattttaggaatctctaaaatagctttttcgtattcttgcagctgcttatcatcaaagccatcagaaagactaaaagcgctggtcataaagatgtcataagctgttttcaaaataagaagagtaatgataaccgcagtcattttatcaatgattaagagattaaaggtactggcaagtatggcaatagatgttcctagagaagtcagggcatcagagagattgtcttttgctgcagccatcagggcgcctgattttaactttttcgacaactgtttattgtagaggtagaggataaacataacaatagcagaaattattccaaccagagcgccataaggatcaatttgggcacgactgttgtgaataatgccgttaatcgtttccagcagaacctgaaaaccgacagtaaacatgataaatgaagtgattaaactggctaggtcttcaattttccaatggccaaatttatgatccttatcagcaggcttgctggccagataaagtccaattaaaatggtgacattggccacaatatcagaaacattgttaaagccatcggctgttagtgaagcagaatgcaataaatgccctgaaatcagtttagcaagtgccaaagtcaaataaacagaaatagcgattgttggaccacgccgagcaagtttaaggttatcagcgggtgttgacatacaaaactccttggtcaatataataggcttattatagcatgttttgctgaattacaaaagaagagagaaaatttgaaaatagaaaaacaagactgggattatcctaaccttgttttagttttaatgaagctcttgtttttacgtttaaaataatttcttgtttctgcaataataattggtgataaggctaataaggcaataagatttggtatagccattagcccattaacgatatcggcaattgtccagataagatctaattctaagaaaccacctaaggcgaccatgataatgaaaatagagcgataaatattgatgtgtttaaccccaaataaaaactcaaaacaacgctcaccataataggaccagcctaagatagttgtgaaagcaaacagaaccaaacacaaagtcagcactagaacgcctatattgccaaaaacagttgcaaaggctgattgtgtcagtggagcaccttcaagtcctttgacagtccattttccagtgaccaagatagaaagaccagttaaggtacaaatgacgagagtatcaataaaagtacctgtcattgaaatgaggccctgttcagcaggttcatgagttttagcagccgcagcggcgattggagcagaacctagaccagattcattggagaagacaccacgagcaataccattttgaatggcttctttcacaacagcaccagcaaagccaccaactgcggctgtccctgtgaaagctccagagaagacttgttcaatggcaggaatgatatgattgtagtgcataaagatgacgatcaaggttgcgatgatgtaagctgcagccatgaaaggaactaatttctcagaaacctttgcaattgattggataccgccgaaaataataacagcaacaacaatggcaattaagatgctgacaatctgcggtgaccaattaaaactattttttagggaagcagtaattgaattgacctgagaaaaggtaccaattcctaaaaatgccactaagatacctgccaatgcaaagaagatagctaaaggtttccattttttccccataccgtttatgatatagtacataggtccgccggagacttctccgttagcatccttagtacggtattttatagccagaagaccttcggcatatttagttgccataccaaaaaaagctgctatccacatccaaaagagtgctcccggaccgccagctttgattgcagtggcaacaccaacgatatttccagttccaacagtggcagcaagagcagtagctaaagccgcaaaactcgaaatatcaccttcccctttgtcctcggcaaagatgagtttaaaggctaaagggagtttcaacacctgcaataatcttaagcgagtactcaaataaattccagtaccgactaaaagaactaataggggaacaccccagacaaagctgtctagagctttaaaaaatgttaacatataaacttttctcctcataaaccgaaatggaaatcaaaaaagaggttgtcaatacttgacgatacctctagagttagaagataagaattgtttcaacattaaaaattctttttttcttttctgtccttttgcctgagagtttgagcaaacagccttgccccttcggcgcctagtaggtctctccagaagcccgtcaattatcagttatcctaataatgtcactcggttttactatttttattcttttattgtatagaatttcaataaaactgtcaatcttttctgaaaatttcaagaaaagaatttaactttttttgaggtctaaaaaatgatataatttgaaagttagattgatagtttggagaagaagatgaaccctttattacatggaatgaatgaaaaacaagcgcaagctgtgaaaacaacggaaggtccgcttttgattatggcaggtgcagggtcgggtaagacacgtgttttaacccatcgcattgcttatttgattgatgagaagtttatcaatccttggaatattttagctattacttttaccaataaagctgcgcgtgaaatgaaagaacgtgcttttgctctaaatgctgcgacacaggagactttaatcgcgacttttcattctatgtgcgtacggattttacgtcgtgatgcagatcatattggttacaaccgtaactttactattgttgatcccggtgaacaacgcacgcttatgaagcgtatttttaagaattttaatatagactctaaaaagtggaatgagcgtgctgtcttagctgccatttccaatgctaaaaacgatttacttgatgaaatcgcttatgaaaatagggcgggggattcatatacacagcttgtcgctaaatgctataaggcctaccaaagtgaactgcgtcaatcggaagctatggactttgatgacctcattatgctgaccttgcgtctttttgaccaaaatcctgatgttttggcttattatcagcagcgttaccagtatattcatgtggatgagtatcaagatactaaccatgcccagtatcagctggttaagcttttggcttcacgatttaaaaatatttgtgtggttggggatgctgatcagtctatttatggttggcgtggtgctgatatgcagaatatccttgattttgaaaaggattatcctgaggctaaggtagtgctcttggaggagaactatcgctcttccaagaagattttgcaagctgccaatgatgttattaaaaataatcgtaatcgccgagataagaaactctggacgcaaaatgatgatggagagcagatcgtttattatcgggcagatgatgaacaggatgaggctgtttttgtcgcctcaactattgctaatattgttcgtgaaatggggaaaaattttaaggatttcgcagttctttatcgtaccaatgcgcagtcacgtaccattgaagaggctctgcttaagtccaatattccctacactatggttggcgggactaagttttacagccgcaaggaaattcgtgatattatcgcttatttgaatgtaattgctaacactgccgacaatatctcctttgagcgtattgtcaatgaacccaagcgcggtgttggaccagggactctggaaaaaattcgtaactttgctaatctgcagggcatgagtctgttagaagcttctgaaaatatcatgctctcttccatcaagggaaaggctgtacaagcagtttatgagctggctaatatgataatagacttgcgttctaaactggatcattacagcattacagaagttgttgaagcagttctagacagttctggttaccttgaggttttagagattcaaaagactctggaaagtcagactcggattgaaaatatagaagagtttctttctgttaccaaaaattttgacgatacgactgatgatgttcctgaaaatgaaacaggtcttgaaaggttaagtcgctttcttaatgatttagctttgattgctgatacagatgaagctgaaagtgagtcagctgaagtcaccctgatgacgctgcatgctgctaagggactggaatttccaatagtcttccttattggacttgaagagggtgtatttcctttgtcgcgctccatggaagaagaaagcgaactggaagaagagcgccgtctggcttatgttggaatcacgcgagcggaacaaatgctttttatcaccaacgctaattctcgcacactttatggccgtactagctacaatcgcgaaagtcgctttattcaggaaatttcagaagatttgctggtgcatcagggattggcgcgtccagccagagcttcctttaaagttagttatcaagacagcaatgaaactaaatttggtcaaggaatgagtctggctcaggctttacaggctcgaaaagttgcttcacagcctaagaagtctcctttttcaaatagcaaggatgatcagaaagaacacattgattggcaaattggcgatactgctcatcataagaaatggggagatggcactgtcttagaagtttcgggcagtggaagtgctcaggaactgaaaattaaattcccagaaattggcttgaaaaaagttttggctagtgtagcaccccttgagaaaaaggagacataagaagagaaaaggtaaaggactttgttgcttccacaaggctgatcagatattgatacgaatttagcgttcacgggattagacaaataaactcaagcagtctactggactgttagagatttgctcctaaaaaacaagttgcgaaatttcaatcaacacttgcgttaagcggaaaacagtttactaattaaagaaaaaattttcatagttttattgttatagtttataactataggtcaggataagtaatagaaaatagtcatttaccgaataatggagtagaatggatctaattaataataaaaggagagcttccatgactcgagaattttcttttgaaactttacaattacatgcgggacaaagtgttgatcctacaacaaaatcgcgtgcagtaccaatctatcagacgacttcctatgtgtttaatgatgcacaagatgctgaagattcttttgcacttcgtacacccggcaatatttatacgcggatcactaatccgactacagccgtttttgaagaacggatggctgctcttgaaggtggtgtcggtgcactggcaacagcttctggtatggcagcagtaacttatattgccttggctcttgctcatgcaggtgatcatattgtgtcagcaacgacagtttacggtggcacttttaatcttcttaaggaaactttacctcgctatggcattactacaagttttgttgatgttgctaatttcgctgaaattgaagcggctattacagacaagactaagtttattatcgctgaaacgttaggaaatcctcttggaaatatcgctgatcttgaaaaattagctgagattgcccatcaacatgctattcccttggttattgataatacctttggtactccttatttgcttaatgtcttctcttacggtgttgatattgctgttcattctgccactaaatttatcggtggacatgggacatctattggcggtgtcattgttgattctggaaactttgattgggaaaaatctggaaaattcccacaatttgtagaaccagatccttcctatcatgacattagttatacacgtgatattggaaaagcagcttttgtaactgcggtgcgtacgcaactgctgcgtgatacaggcgcctgcctttcacctttcaatgcctttcttttgctacaaggtctagaaaccttatcacttcgtgttgagcgtcatgtggaaaatgctaagaaaattgcgtactatctggaaaatcatcctaaagtcacaaaagttaattatgctagtttgccatcaagtccttattatgacttggctcaaaaatacttgccaaaaggagctagttctatctttacttttaatgttgcaggcagtgcgaaagccgctcgcgaggtcattgacagtcttgaaatcttttctgatttggcgaatgttgctgatgccaaatcactagttgttcatccggcaacaaccactcatggtcaaatgactgaagaagatctacgagcttgtggtattgaacctgagcaaatccgtgtttctattggtttggaaaatgctgatgacttaatcgaagatttgcgcctagcacttgaaaaaatataaaagggggaaatcgatgacaacacttcaagaagcctatcttgcttttaaatctgcccaaattattgatctaacacatcaaataaatgaaaatagtcctcattttccattattgcctgctctagagaaaaaagatctctttaccttaaaagatggttttcatatccaacaatttacggttgttgggcaatatggcacgcatattgatgcacctattcattttgttgaaggcggtgcttggttagatgaacttcctttggaagatctccttttaccgatgtatgtcatagataagtcacaggctgttgctgataatcctaactatgaattgagcaaggctgatattcttgcctttgaggaaaagtatggtcaaattgaagaaggggcttttgttgcttttcgcagtgattggtcaaaacgctggcctagtcaagaggaatttagaaatcttgatactgcaggtgctcaacagacacctggctggagtcatgaagctttggaatttctgattcatgaacgtcaagtaaaagcagtaggacacgaaacttttgatacagacagcggccaagcagctgctgaaaatggaaaattagttgaggaatattatctgctggatcagggaatttatcaattggaagttttaaacaaccttaatctcctacctgctactggtagtttcatttcgattgcttatcctcattgggaaaaagcaacaggttctcctgttagagccatcgcttacattgcgcaggagtaaagataaaaaaagaagcggtcttcgttcgcttatgccactctttttgtatgaagagatatgttataataaaaaagcagaaaggagctagccatgcagtttgtatttgatatagatgggacgatttgctttgatcgttttcagatagatgcaagaatcaaagcgattttaaaagacgctgccaattatgggcatcagatcagctttgcttcggcacgctcttatcgcgattgtatagatgtgttgggtcaagaattaagtcaaaaaacggtcatcggtttaaatggcggtcttgcctataaagctggggaattaattttggaaaagcccatgaatcatcgggcttttgacttggctctttactactgccatcgctatcagcttccttattttgtggatgatgattttaattatgcccatcatttggaacaattcatcccttttattcatagtgtggatcctttaaaactagctaaagaggtagtagttgaagacttgaaacatcccattaaaatggttgttttctttggcaatcatcttgataaaattgcagaagttagtcatcatttagctaaactagagcagctagacataacttttcatgatgatgaaagctgtctctatctcaatcctaaagaagtcactaaatcttcaacgattcaagagctctttgatcatgatttcgttgcttttggtaatgatcgcaatgatatcgctatgttccaagtagcggtttatagtgtgcaagttggtgatttcgcagatttaagcccttttgcagatacgcaagtattactgagacaagattatcatcaagcagtggcagataaaattcacgaaacgtttgaaaagtttcgtgcttagcattaaaacatatccatcctgtatcaattgtttgtgaattgttttaatttgtaattcctctttaaagtttaagaagtggtttttggtataataagagggtgagaatagtggcctataatgggagtggaaggaagtggacgctatccaaatccatgcctctatcctctttaaattaaaaaaacgaataggaaataatatgaatcttcaacatattactattttgacactgtttattgaaggtcttctatcatttttctctccttgtgttttgcctattctgccagtttatattggcatcttggctggtcaaggagaggagaagcaatctggagaaataatttgggataggcgaaaagtctttaccaatacattcttatttatttctggcatagcagcgaccttttttattttggcttttgctagcagccttattagtcaatttcttcaaagtcatattcaatttcttcaaaatttgggcggaatcttaattcttattatgggattagtgcaggtaggtctcattaaatctcatttttttaacagggaatattcagctaagaataaagtctatcaagcaggacaaaaagtaacccctctcatcgcttttttaatgggttttacttttagtttttcttggacaccttgcattggtccgattttagccagtgtcttcttatatgctagcacccatcagggcatttacagtgttttactcattttgatctactgtttaggatttgttattccctttgctttgattgcgctcttttcgcaaagggtaatgagcgtttttaagaaacaaaaacgatttttaaaatataccaaattattttcaggaattcttcttattctcattgggatttctatcttaacaggatcatttgctaaaatagcacacttatttaattaaaaaggagatagttatgaaaaaggttattttaccattagctctcggtgttaccttattaggaattggattaacaaatcagacaacgtcttttgcacaaggcaagacatctccaaaaatagttcaaacggctaaaaattcagcgcctgcattcaaattaaaaaataaaaaaggcaaaacagtcagtctgtccacctataaggggaaaaaagtttatatcaatgtttgggcaacttggtgcggaccttgcatgcgagaaattccagatttagaaaaaatctatcagacttataaacataaaaaagattttgtcttcttgtctgtaacatcgccaaatgattccaaatataaaaatagtgatcccattgacaaggataagagcaccattttatctaaagctaaagacaaagggattacttatccaattctttacgattatcaggacaattttgcccaagcatatggcattcgttccattccaactcatatctttatcaatagtgacggcagtctttcggaaaaaatcgcaggaggtcttgatgaggactctcttaaatattacctaaaaaaattgaagtaactaaattccccgtctccttagtaggcggtgtgggcctcatttgactctgatgtttctctattatcaggtgaaatagacagccgcttgttgagtgagtaataataactaaacttttcaagttttttaataaaaacctcggatgactaagaacatatccgcaatttcttgaggggattcttgagcaccagtggtaatccagtgtatgtaaaggctctcaatactagcagcataggtgacaagcatatattcttttgataatcctagactgggattaatagaatcataaaagaaactatgattttcggttatcagctccttaataaaatcccttgttctctgagaaaaattaatctgaataatttgagataaggcatacatgaatttctgttgactttgcagataggttagagcttgaataagattttcccgaagtcctccatttgccgaattaagcattaaatactctttaaaatcccttgtgacttcatgggccaatttatcgacgaggtcatacttatcttggtaatgaaggtaaaaagtgcttcgattgacttgcgccttttcagtgatttttcgaatagtaatgctattaaaatctgaatttttcagcagcagctccgtaatagctgcttttattttagtcttgctttgtgtctggcgtttttgaatcatattctctccttaaatagacattcgtctatataatgatgcttgtttttaacttgcaatcattatatactaaaacaaaagttaaatcaacatgtgtctagataaggggattcttatggcttatattgaaatgaaacattcttataaacgttatcagatgggtgaaacccaaatcattgccaatgatgatattagttttgaaattgaaaagggggaacttgttatcattttaggtgcatcaggtgctggaaaatcaacggttctgaatattttgggtggaatggacaataatgatgaaggtcaggtcgtgattgatggtgtcaatattgcagactacaatcaaaagcagatgaccgcttatcgccgcaatgatgttggctttgtcttccagttttataatttggtacctaatttaactgctaaggaaaatgttgaattggcttcggaaatcgttagtcatgctaaaaatgcagaagagaccttaagagaagtaggtttgggagagcgtttaaataactttcctgcacaattgtctggcggcgaacagcaacgagtgtccattgcgcgtgcccttgctaaaaatcctaaattacttttatgtgatgaaccaacaggtgctctggattatcagactggaaagcaaattcttaaactcttacaagatatgtctcgccagaaggactcaactgttgttattgtaacccataattctgccttagcaccactagctaatagagttatttatctgcacgacgctaaggtaaaagatgtgaaaatcaatgatcagcctcaagatattagaactctagaatattaaggaggtgtcttccttatgaaaaagagaatctattggaaaacgatttatacggctttgctgcaatctaaaggacgttttatttccatcatgcttttgatgtttctaggctcctttacctttattggtttgaaggcaactaaacccaatatgcaaactttagcaagaaattacctgcaaacccataaaacggcagatttgtttgtcacagctagctctggttttagtaaagccgatcagacagaactgaataatatcaaaaatgcccaaatagactttggccaagtaacagatatgacactcgcaggaaaagatgacgccatgcgtgtcttttctaagactcaatccctctcaacttatcatgtggagtcaggacgtttacccaaaagggctgatgaaattgccttaatttcaaccttgaaaaaaagctataaaataggagatactttgacttttcaatcttctgagaaatctcttttaaagagaagaaagttcaaagtggttggctttatcaattcatcggaaatatggtcaactttaaacttaggctcatcaacagcaggtgatgggacgctatcaagttatgctctggtcacctcatcagcctttgctaacaagaccaataccttagcgcgcattcgttacaataccttaaaaaataggaatcctttttctgatgattacagctcaaaagttagtcgttatcaagatgacttagataaattgttagaagataatggcaagaatcgcttagcagagttaaaggaagcaccacaggcaaaagttaatcaaagtaaacaagccttagcagcagttaaaaaacaactgcaagaaaagaaagcagcaatcaatagcttgccggcttatcaacaagagcgggcgcaagcctctcttcaagaagcaagtcagcaacttgcccagaaagaaaagcaagttcaaagtgctcaggctaaaattgacgctatagtggagcctacttacagtacttatacacgctccaccatgttaggtggtgagggctatacggtttacaattctaatgccaatagtatgggaaatcttggcaatatctttcctattgtcttatatgctgttgcggctttggtcacctttacgaccatgacacgttttgttgatgaagaaagaactaattccggtgttttcaaagctttaggctattctaatcaagatgtgattcggaaatttctcgtctacggctttgtggctagtttgataggaacaattcttggtattttcggtggtcattaccttttggcaaggattgttgctcagatttttacaggtaaaatgacccttggtaatcttcatcttgctttttattggtcctatagtcttattgccattctcttaggtcttgttagtgctgtcttgccagcctacttaattgccagacgagaattaagtgaaaaacctgctcaattattacttcccaagccaccaatgagaggggcaaaaattttcctagagcgcttgggatttatttggaatcatttgagttttactcataaggtgacaacacgaaatatttttcgctataaacagcggatgctgatgaccgtctttggtgttgcaggttccgttgctctgctctttgcaggccttggcatacagtcttctttaggaacagttattaaggagcaatttacgcagttaacaccctatcatctagtagtaagtaagaaagatgggactgaaaatgatcaggaattgacagatttcttgaaatcaaaagaggtctctagctatcaaagcctttattatacccatgtcatggaagaaattccccatattaaggatcgtcagtctgttgccattatggtatcagataaaaaagactttacggattttgtccatttaaaaaatgttgattctggtcattcgttgactttaccgaaagaaggcgtcctgatttctgaaaaattagctcgtttttacaaggttaaggcaggcgatagctttaaattcaaagatagcaagagtaaaaagcggcaagtcaaagtagcagcagtgattaagatgaatgctggccattatctctttatgaccaagtctgcttatcaaaagatttttgcggaaaagccagataacaatgcttatttcatcaatctaaagaatgattctgtttctcatattaaagatacagcaacaaagcttttagccatgactggtgttgcctcagtcacacaaaatacagcgcgcatgaagaccatcaagaccattgtgacatcgctaaatgctgctatgactgtcttagttgttattaccattctcttagctcttgttattctttataatttaaccaatatcaatattgcagaacgtattagagaactctcaactattaaagttctcggattttataatagagaagtaacactctatatctatcgagaaacgattgttctctccttggtaggaattgcttttggattattagcagggcgctacctgcatcaatttattatggaaatgattggttcggataatgttatgtttggcacaactgttgctggcactgtttatcttattcctgttttctttatcctgctgattttgctcattttgggttggctgattaatcgccgtctgaaaaatctcgatatgctagaagctttgaagtcagtggattgatctggaaatgttataaacagtatgattttacagaaaaaaaagaatggttccttgttttgtagtgcaaacagtttcttaaggctgtttgcattattattttgaatttaaactaaaaatagtatttaaaaaaagtcgcacttttgttataatggtatcaatatgataacagtgttatcaaaaaggagatgatccatggttagaaaagatgaaaccttaaatttggaaattttaaatagtgccaagaaagaatttctaacatatggctatcaagaagcttctttacgtcgaatttgtaaaaatgctggtgtaacaacaggagctctctataaacgctattcagggaaagaagctttgtttggtacccttcttgaacctactgtgcaagcaatagagatgatgaaacaagagtatctgcaaaatgattatcaattgttaagagaaaataggctatcacaaatgtggaacaaatctttagatgaattgactgacatcatgcagttcatctatgaccacgaagataatatgcgtttattactctttaaatctcatggctcaaaatttgagacttttcaacaagagatgattgaggggttgacagatagtacttatcattatcttgagcaagcttatcaagaaggaaaaatttctcatatccttgacaagtctcagctttgtttagctatgactgcctattacaaagctattatccagcctttggagcaggggtggtcttatcaagaagccctcttggcttgtcaaactattattaaactctttaattggtctcacttattaggcttttagaggaggtagtatgaagaaaaaatcaacaatggcttggatatctgagttcattgcaccctatagatttcattatatagcaagtgtgcttttagcctttgcttccgttatttgtggttttctgccttatttttatattggacggattattcgtgatttgttcaatggtcttaaaaatgggcagctttatttacaagcatgtctgtggatggctgttttttggttggcttatgccatttgtcatgctctatcaacggctctttcgcatagagctacttttattgttttagcggacattcgttttcgtttaacagaaaaattagctaagattcctttaggatctgtctttgcgcaatcgtctggatcctataaaaatattatcgttgagcgtgtggatgaagctgaaacaaccctagctcatattattccagaattcacggcgtccttatttggtcctttaattgttttaatttatatgataagattggattggcgtttgacccttttatctcttttaaccttgccaatcggcattttattttatgtcaatatgttgcgtaagagtaagggagattttgaaaatacagtggttaagactaaggctttaaatgatacagctgttgaatatatcaatggcattgaagtgatcaaggtatttggaaaggaaaaattttcctatcagaaatttgtcacagcagctaaagaaggagctgactgttttattgattggatgcgtaagtgtcaatttgatatggcagcagtcattgttatcatgccttcgatcttagctatccttttacctgttggtgcttattttgtttacagtggcagtttatcccaagacaatttcattttactaatgattttatcaatgggattgctgacgcctttgataacactgggaacttatatggatgacattagaaaagtggggaccatttttggtgaaattacggaaattttggaacatcctgatttacaacggccacaagaattggagcaacctttacaaggaaacgatattcttttagaaaaggtttcttttgcctatgaagaggacaaggatgtactgcatgatatttctttgaccatcaaatctgggacagttaatgccttggtcggtccttctggctctgggaagtccactttagccaaattaattgcttctttctgggatgttagaacaggcagcatttcttttggcggacttgatatcagaaagattccactggaagaatacagtcggctgatcgcctatgtttctcaggacaattttctctttaatgatagtattttagagaatattcgtttgggcaagccatctgccagtgatgaagaggtttaccaagttgctaaagattgcggttgttatgattttatcatgaatcttgaaaatggctttgcaacgcaggttggtagttctggcagcagcctgtctggcggtgaacgccaaagaatagccattgccagagccatgctaaaggatgcccctgtggttattttggatgaagcgactgcttataccgatcctgaaaatgaagctctggtacaatcaagcattgcacaattagtgaaagataaaaccttgattgtgattgcccatcgcctctcaaccattgctgatgcagatcagattattttagtaaatgagggacatatagaagcaattggcaagcaagaagacttactcaagtcaagcgacctctatcaaaagatgtggcaggcacatttgtcggtcaaagatgcagaccgtgatgaaaaaataggaggcctggctcatgcttagtattttaaaacgcttttttgatttttgtaccgaagaagatcgtaaaaaattttatacttcccttgtcctagggcttctaaaagccatgattgcagccatgcgaattccagccattgcccttattttgaatgctttgattatcaataaactgtcaatgacggttatttggcaggcaacaggtatcttgttgctgtctcttgtgctcaatatctttgtaaccttaaagataaccatgctgcaaacagaaggtggctatcatacttgtgcacaaaagcgcatcgaaatcgctgagcatattcgttatttgcctatgggctatttcaatcaaaatagcttgggaaaaattaccagcattacaaccaatactttggaaagtttatcaaatattgccacacgagtggttatggtaacgacacaaggtttcttgacgactgctgttatcacactttttgtccttctttatgattggcgaatcggtttgattctaatcgctggcttagccgtctttctcctgccaaatggtttaatgcgcatgcaggctggagctataacgcctattaagcaaaaagccgacactgacttggtggatgttattttggaatatgtccaaggtatcgctgaagtaaaaagtttcaacattaccaaacaatcggctaaacggttgtctcaaacaatttttgccaaaagagatgccgatattaaaatgaccttggtcactgtaccttggattgctgttcaaaatatcatcaccaaattaacaggggttgccatgtgtggtgcagctatttggttttacttgcaaggcagcatggacttgatgatctgtatgatgatggtcatcagtgcttatatggtttacgaaagcttagatggcgtcagcagcttttcttcccttttaagatctgttgatttagcagtggaattggtccaagaagttttcgccttgcaaccaatgaacaccaaaggacaagatattcaaccacaaactagcactctagaacttgatcagattacttttacttatgaaaaacgtccaatcatcgaaaatctttccctgaccattcctgaaaaaacacgaacagctattatcggcccgtcgggttctggtaaaacgaccctttgtcatctgatggcacgcttttgggaccttgacagtggcagcattcgtttagatggtcacccattgacagattatagttatgatagtctgattcgcaacttcagttttgttttccaaaatgtctatcttttcgaagatagcattgaaaataatatcaaattcggacggcaagaagccagccatgaagaagtcgttgccgtggctaaaaaggctagatgtcatgatttcattatgaacttgccaaatggctatgaaaccattattggtgaagcaggcgccagcctgtccggaggcgaaaaacaaagaatctccattgcgcgtgccatgatgaaggatgcgccaattattattcttgatgaagctacggccaatatagaccctgaaaacgaagcagaactcatgacagccgttgatgaattaacacaagataaaaccattatcatgattgctcaccgcctgaaaaccgttgaaaatgcggatcaaattgttgttcttgacaaaggtcaaattgtccaacaaggcaagcatgcccaattagctcaacaagcaggcatttatcgtgatttcatcacaacaagaaaagaagccctctcatggaaactagcaacagaaaactagcttgccagaagaatgaatagatagtgaaataaaaaggagagaaccatgaaaataaggttttctcctttttgcgagcaagcaaatgcaaaacgtttttagatgtcaactaatattcggttgattttttaaataatgggttaatgtcgatttatatttgggtagcctttttaaatgtcaactaacgttaatagcatcaaagcgccaaacccagtgcttttttgccttgattggggtataataggagtgtttgaaactattatgatatagggagtatataatggaatacaaaatttccccagtttacagaatgaaattattagaaaaagtagaaaaagaaatttggaatcggtataaaagttataaagatgttgagcagtatatgaaacttaatcagatatacgatgggtttgggcaagttgattttgatatttcttatttcagtgaagggaagaataaggagaaaattaacctaattgaaacattaagggtgattgctaaagatataccagataaattattaaaaatggccattgacttagggattgaaacaccggactacattccatctattcctacttttcgaaatgaactgaaagcagactataaaaatgcttcgacaagttttgaaaaagcattccaaaatatagaggaagaccctgctgaatcggtaggatatgcaaactcggttcttgagagcattatcaaggaaattttaaaagatcagagatttgatattgatgcgacaaaattaacaaatggtaaattagtaaaagcaattttaaaggaatttggattaaatcctaatagtcctcaaatgcctgatgaaataaagagtattggaagttctcttacgactgtttcaaaagctattgaggatttgcggagtgataagacatcatttcatggtcatgattcggagaagtatcttattgatgaacctttatatgcttattttattgtcaatgcctgtgcaactgttgggttatttttgataaatttttacgaaaagaaatttccaaaataagtagaaaacatcaataatgatgaagggaatgatttgccgttttgatagtgcttatgaataaaagaggtaaatatgatatttgacagtcttgaaagtatatttaatattttggaaaaaattaatgttcgtaggaaacatattaagatagagtctattaacattactgatgacaggagtagtaaagaatacgttaaaacattaggtactccaaacgagaatcattattctaatttagttcataacatagtcactgttcaaaataatagtggcaaaacacaggctattacaagtgttcaattaaaaaatgttcaacttacttcaaaatcgtttccggttattcaatatgatggtggttttataaatgacacccaagagttttgctttatgttaattaataacggaaataaagcaggacagacagcagattgtatggtgaaattttacgctactgaacagtctcaaaaaaagtatgaattactcttagaatatccaatagaaacacaggaaattgaggagggacaaattaaagttgtagctttggttgactatttgaataactttaagcaatattttgaagagaatgataatgttagaggtattagggttgaagtcattagaaatgagaaagtcttatttgacgatggacaaggctataatagagaacaaggaagatttgtgaaaccattaggagggactggaattcctataaatcttaacaagactctgttcagagtacccagaggatttaaatttgaaaaagaattaattcaaaaatgtcatcagcccttaaatattggtacaaacacaattgatttttacattctaacagaagaaacagcttctttaaactatgaagttgaattaataagtggaaataaacgtatctgtcctcctcaaaatgaaggtaagcttaaacttgatgtttttgttccttgttacaaagttttggataatcatacttatggaaaattttatgaggtacttgaaaaacagggaattaggtgtgatgatatatttacagtaacagatatgaaattaattaaggaagacctagtatataatatatacgaaccattggaaaagatggattggtgaatctaacagtgctgtatagttaatattttacatatcgaatttatgttggaagctattttagagaccttgcaggagtattcgctcaaggaagtgagcgataaagaagaaacagtctttaagcaggttcaggaatatcttgctagtcacgattttattaagggtcaaagatttgcaagggctgacagcattgagtcctgtcagttctagacgttacttaacgaagtttactcagttaggtttattggattctaaaggcagtaatagggatagaaggtatcaataaaaggagaattcatgaacgaaatcaaatgtccgcactgtgggacagtttttaccattaatgaaacggaatatagtcagcttttggctcaggtgcgtggtcaggagtttgaaagggagattcatgagcgcctgcagcgagaaacggcgcttttggaggaaaaatccaagaatgaattgcaggttaatctcaatgataaggacaaggagattgctgatttacgggcgcaattagataagttatccgataagaatgcgctggaacttgctaatgccttatcagagaaagacaaggaagtgcagagcctgcgaaatcaagtggataaattacgtttggagcatgagaatcagctgcaaaaaacagtggctcagatcgaaaaggaacgtgatgaggctcaaaatcaattggtggtgcaggaaaaagaatctgaactgtccttagctgcggtgcgtagcgattacgaggtccaattaaaggctgccaatgaacaagttgaattttataaaaatttcaaggcgcagcaatccaccaaggccattggtgagagtctggaagtttatgcggaaagtgagttcaacaaagttcgctcttatgcctttcctaatgcttattttggcaaggataatgaggtgtcatctgcttctggttccaagggggactttatctttcgtgaagctgatgagaatggggttgagattctttccatcatgtttgaaatgaaaaacgaggctgacacgactaaaaccaagcataaaaacagtgacttttataaggaattggacaaggaccgcagagagaagaagtgcgaatatgctgttttggtgaccatgttagaggctgataatgattactttaatacaggcattgttgatgttagccatgagtatgagaaaatgtacgtagtgcggccgcagttctttattcagttgattggacttttgcgcaatgctgcgctcaattcactcaagtacaagcaggagttggctttagttcgtgaacaaaacattgatattacgcattttgaagatgatttggaaacctttaaaaatgcttttgccaagaactacaattctgctagtaaaaatttccaaaaggccattgatgaaattgataaggccattaagcgtatggaagcggttaagcaggcacttcagacatcagacaatcaactgcgcttggccaataacaaacttgatgacgtctccgtcaaaaaactgatccgcaaaaacccaaccatgaaagctaagtttgaggctttgaaggaagaataaatttataaacgatgaaagataaagacactgaatatgctaaaaaactagcaaaagatttaagtaaatccataaaacaacaaaaattagttatttttgttggtgcaggagtttctatttcacaaggatatcccaactgggataattatattgaacatcttattaagtattggcaagggcagattttagctgaaagtgacgagaaaaagcttggtagagagcatcatttgatttttgatttaattagtaaatctgatattagtaataaacgcaaagttgatttggtcaactatgaactaaagaatgtttttggtgaagattttgaaaaaaggcggttagattttgaaaggggatatttcaaaaatttacttccctattcattggttaatccggtattagaatctttagcaagtttagatgcaatatttataacttcaaattatgattatgaaattgaaaatcatgctaaacgtttaaaaaatactgtagtaacaatcaacgatctaaatgaatttcagcataacaaaaaaggtaaactacaatttggagatgttctgcatattcatggtacccctgattgtgatatagagtattttgttagttcatcagcagattattcaaaaacgtatttaaaaggtagaaataactttaataaattagtaaattggtttaaaaagacaaaaccgacagtcttatttattggagctagccttgaagaagatgagatcttatcattacttcatgaaggtagtcagaattatgcattaatgaaatcagaaaatacaggcaattcaaaagttgatgaacactataaaaaaattgttgaaggattttttaattctgaaaatcatactcagattatatggtacggggataaatttaaagatttaccgatctttgtagagagattggtttcagatataaataaagaattgggagtacatgaatttcatagtgagtggaataatcttttaaatccttcgagagaacaagagcaatacaatcaatctttagacaatatttcgaatgattctcattatctaacttctcttgtcaataaagttattgaaattaataataatgatctagacaatttattattaaaaggcattctccaaggagaaacactagagaaaattagatctggttcatttccggtgttttggaagtttatcgctgaaaatattgaaaagctaaatgatgatgaatgggaaacaatttatggtattcttatccaaggaaatcaaagatgtttcatggatgatatgtacaaggtctattgtcaagcgatagaaaataacttatttgataacaagcaggtgaatgaactcagaaaagttttagcaagagatagagatgttattaattctagtttcaatcaggataatacactactaggctactggtttgtaaatagttttgaatacagtaacgactatttatatattacagatgatcaggaaatagaagttaatttaaattcagattgtgttaaacaattgagtcaaatattaagttcttctcagcattttaactattattcaataactgaatatttaaaagaaaatactaatattgaattattttataaacttgtaaaatctaacaaattacttattgaaggaaaagattttattgaaaatgttcctacgaagctattaaagactcgattagttcaaaaaatactagttcaaattgataatgaaactgatttgaatatagttttagtaaatagattaatagattttattaatttttctgacatttgctttggaggagaactaaatacatttgttgagaaacaccgaagtattattagaaatcaaaataaagaaatcttagaaaaaccttatctaaatatgacaataggggaaggtttggttccaattccacaattttcatttttaactcaagaagaccttgcagggtatgatgaacctaaattgttagagattttagtaaatacaaaagatgaacaaagacgttcatcattcttagaagaagaaactatttcagaaactgaaaacttcttaatgagtatcttaaaaacttcaaatgaattatctgaaaaagtttctaatctgttggaaaatcatgttgaagatttatatataaagtataaacgactttatgtagaaattgctatttcatcagaaatctcggatgatctaagaaatgtagccaaaagagaatgtttagaacgatttgaaaaagagtcctttgatagaaatgatgaaaacttctttaattactttgtggctcagcaaaatgatgaagaatcaatttttgaaaaattacttactgtggatccaaataagctatcaactttgagtgatgatagtgagcaactagatatgtttcattttataaatagtgaattgggatcatatttgcaatgtttgatatctttaattattcatcatcaggattatagtcctaaagttattcagaaagtcgatgagattgaagattcaagttacaaagaaattgcacaaggcgtccttatcagtgagtacgacgttaaagaaattgatgtaacataccatacttttttagggtatgcatattatcattccacagtgacctcagaagctgctgaaatttttacagatattattaaaaaacttctaaaagaaaaaattgaagataatcaaattctaaataaagtctatatgattgctttggagtgcattgacccaatcaaagagcatcttgaattatcaaggaataattatggcattatgatcaacactatctttatggaaaaatatgaatttaaatattataaacagtggttacaggaattatttaaacatgattcaatagtaaactatttagaaacaatttctaatttgttgtatcgagataacgttaataaagatagattaattctattcattgaggatctcaaaaattatgtatcaaactataaatttaaattatctttgcgtggaataaactatatcttgaatcaagaaaacacaaaatatttttttatcataggaaaatatttcgtgttgttactagagaatgataagttagaaaatgatttcttttattttgaaaccataaaagctatacttcctttgttatctttagaggaaaggataagcgtattacaaaatattcaaaaacaaaaaaattgcccgcctccagagattgaagaattacaaaaaattatcagtgaattaaattcataaaagtttttaggaagcattaaatatttttccgtcaaaaaactaacccgtaaaaatccgactatgaaagctaagtttgaggagttgaagaactaatatattttacgtaaaaaatcaatacggaggttaattgagtgacgaaagtaatagaaaaaaactaccaaacattagattttatatcactagaagcgaggtaccgagacgggcggacagcgactcttatggtgtctcttttggaaagatcttatagtttagagattgttggtttaaatggtaaggtcgagaatggcaacgaattctttcctttgcgcagacgtaaggtggaagagctgcgctgtgccttggaagaatcggggttgctggactggaagtctcgcgaatttgggacttctcattatcatgaagcgcccttgcattataattatggttacgatgaggtctcttatggagtcgaagaggcagtcttcaagaaagatatacctcctggatgccaagctagactgcataaacttttggaaaaaacgataggagtaacgtttgggtcctacagatattatgacaggaagtgagtgatggcagtgaaagaaccgcttactattcgagaatacaggccggaagatttggaggccttgcttcctctttatgagcaactgggctatccgacaaggactgatgagctgcgggatcgtctggccggcttgctgtctcacgaagactaccatctgctggtagcagagtgtgacggtcagcttgtcgcctttattggctatgccagaatgtatttttttgagcacgacgggtcttattatcggattctggccttggcggtatcagaggattatcggcaggcgcaaaggcgctggttttaaacagcggaatggttccgcggcggaagggagcccacactttttatgagacctatggctttgaaaaagcaagttacggttttgcttttgatttgagctaacttgaatggatagagattattgacaaatagtataccttctttaatagtggttttatgggaactacagcagggaaaataaggtattttgagtatagtctacactggctaaaaatgaatggacgatatattcctgatgtttatcacaccatcttacatcttttgattgtattggttctaatcagctctattttttatatcaaacatccaaagaaggaaaaataaataatgtttttcaaagtgtgagtgatgcaaaagtttatagtggtaataagtctcacaaggaaattatcatcatgtgacttgtcatttgaggaaaagcaatgaaaagaaaaattcaaatgttattaataggcttgctttgtttatctatccttgtgtttattgggatttttgtcagcaaagtgagaccaacgaagacaacattaaagaaagatacgcagctctatggtgtcacaatagatgattcttggtatgataggaccaaaatgactgatattattgcagcactgaaagctatgcctgtcaagccaacggtcagaattgtcatgtcaaaagatagctctccaaaatcttatgttaatttgttccgaaagcttcataaggtagcttatgttatggcctgtccagttgattcctatgagatgaacttatataaggatgtcaatagttatcgaaagcgttttgcggttgcttatcactatttgtcatcttatacggatatttgggaaattggcaatgaagttaacggtactgactggataaagcagaagaataccttgattacccagaaattaaaggcagtttgccaaacaatctcttctgccggtggcaagactgctttgaccttttattatgaaaatcctaagtatgaccatgatatgatagcttggattaagaaaaatattccagttatgttgcgttctagggttgactatggttttatcagttactatgaagatgataatgaaggttatcagccagattggcagagtgtttttaatcaactacagaatctgtttccaaattcaaatgtcggtatgggggaatgtggtaatacagcagataatgcgaccgaaaacagtaagattgcgatggcaaagaggtattatactatgcctaaatataccaaacattatgttggtggctatttctggtgggaatgggtgcaagattgtgtgccacatgaaaataatcccatttatgatgccattaacaagagtttgaaaaagtaatagttttagaaaagagtcatcttggttcttttttatcttccaagaatacctttgttataaaagatccaacaaacgattgagaaacaaatgatgaaaatggtaaaaattagtattttctggctttttcgccagtttccgttataataaagttatcaatatatgaggtattcttatgaataatacaatagatttatcaaaaccagttgcacaaacgatcaaagaacatcccgaagttaaggatattctggtggagctgggctttaaacctttggcaaatcctgccatgctcaatacagtcggtaaagtcacgaccttgttggctggctctaaaatggcacgaattcctttggaaaagattaaacaaactctagaattcaatggctatgaagtgattggagacgaatgatggcagatgaaagaattgaagttttaaaagacattttattggaactccatcatggtgccagcgcagagtctgttcaagaacgttttaatcagcattttaagggtgtttccgctattgagatttccatgatggagcatgaacttatgaatgctgacacaggcattacctttgaggatgttatgggactttgcaatgttcatgccaatctttttaaaggtgctattgccgatgttgatgtaccagatgctgagcaggaagggcatcctgtcaaggttttcaaggatgagaatttggctttacgcgcagctattatgcgtatccgtcgcattattgaaaattatactaaacccgaaaatgaggactttcgtcaggaaattctgaaagggcttaagcatcaatttgatttattgggacaattttatcatcattatactcgcaaggaaaaactctttttcccaatcatggaacgctatgggcatgattcaccacctaaggtgatgtggggtgtcgatgatgatattcgtgatcttttcaaagatgccaaagcgactttagctaaattgcctgatggctctattgaagaactttctcaaaaatttgaagcctttgccaaggaatttgaagagatgattttcaaggaagaagctattctccttatgattctcttggaatctttcactcaggacgattggctgcagattgctagcgagagtgacgcttacggttatgccattctcaagccgactgaaaaatggattcctcaccgtgagtcttttgataatgaagctgacgcggacacttctgacaaccaactggctgacgctctaaatcaagtgcaagatgccaattcacctgaggggaccaatacaaaagttatcaacacaccagaaggtcaatttactatcacttttaaacctaaggaaaaagaagcagcagcagatcgtacgacccaacagccttttggtaacggttatctatcggtagaacaggctaatctcattctcaatcatctgccactggaaattacctttgtcaataaagatgatattttccaatattataatgacagtgttcctgcagcagaaatggtttttaaacgcacaccaagtcaagttggccgcaatgtggagctttgccatccaccaaaagtcttggataaggttaagaaggtttttgaactcctacgcaacggtcagcgcgataaggttaacatgtggtttcaatctgaacgcctaggcaaatttgtctatgtgacctatgcagctgtccgtgaccaagcaggagactttcaaggtgtcctcgaatatgtacaagacatcaaaccattctttgaactagatagtgagttcaatcgagatatataggtgaaacgataaaaagcctaggatcatatggtatgtctcccagttgttggatgcttgttcaacaattggaagatatatcattatgctctagactttttttgttatgaagtaagaccaatcagataaatctctttttaagctgactgactgctaagccataaaagagaataatgtagatgacattaagtcctagaaacaaggataattctggcagggtaaaaggtactaaggcgcgagctcgaagacctacagcaacttgtgcgtatggaaagatcgtaaatacactgttcccaataaaaagggtcatgagcccggccattgccaaaatagcagagatgagaataggtactgcaaagtttttcaggcgaatattgataaaaatttgaatggtaacaatagtaatagtcgccagccagcctgtaatagaccagagcaaaaagtctggcagaaaacctacaaaagatactttcaaaaggacagcgctaagcacgtaaaagaatagcagcaataattgactgatggccataaccaccgataagctggtgatttttgttaaaatgatgcgattaggtttgataggaatggttaagagccgctgccagtttttattattttcttcgaattgacagctgatggaacatatggttccaatgaggataggggtgaaaatttgtgaggcatagaaaaccgtttgtccccagaggatagaagcttctgttccatcaacaaggtagttgcgattgagggcaaacatcattgttcctaatgaggttccgacaagattgaaaaagatgagaattatcggaatggcgcttttcctgatttttttaaattcaaatattatcataataaatccgcctttccgataagttttttactgacaaaaatagctaaaagaatgataagcagcagagccactaattttaagggatagctactatcatattggaaaaggtaagtatgagcccctgttatccgcttagcgattcccatcatagagaaatattgccaaggaacaaagaaacgaataggtaggggtagagcactgataccgacaaatgataggaaggatccaattagacctgtcaccacggtcacatttgctttttggtagataaaagccaagcaaagatgaaggcaagataagaaaatacagactaaaaaagttgtcagcaaagagagacttaattgagcaggtgttaccttgacttgcgcagcttgaatgatgaattttaagaagatggtttgtagccaactgaccacaaaggtaaaaatggtcatcaagattagtttagccttaaaaagttgccaagggctttcattgctgatttgcaacagtttaaaagtcttacccaagtgttccatttccagtagtctagatgccaaaacagaaataaaaagcggtaggataaggtcgtttatgtaggccatgtcaaagatggcattgtaggcttcatgtgtattagccagctcatgattgataacaacactgatccagactaattccacgataataatgacaatcaaggacagcaggaaagagcgtctttttaatttagtaaattctaagcctaaattgagcattacaagacacctccttctcgtcctgtcatatcaaggaagacctcttccagtgatttacgcaccatgcggacttggtaaatatcaatgtcatttgccactaaaactttaacagccgctgcgatattagttttgttgtaatctttaagtactatgctctgattttcttctagctcaaaaccttttcgcatcaatagctgttcagcgagtgcatcatcactggtctcaaaaaggtatttttcatcttcttccaactcagtaagttgtccttcaaaaagtagtttccctttgttaataataccaacagtggtagccatctgttcaatctccgacaagatgtgactggaaataatgacggtcatgtcatatttttgaggtaaggatttaatcagttcacggatttcctgaataccagcaggatctagtccgttggttggctcatctaaaatcagtaatttagggaattttataatggctaaggcaatgcctaaacgttgcttcatccctagtgaatagtttttaaccagcttatctttttgctcgtaaagcttaacaattttcaaaaccttatcaatattttccttgggtaatttaagcaaacgttgaataatctctagattttcataaccggtcaaattagcatagtaggatggctcttcaatgagagatcctacacttgaaagcagtgcaatttgattgctgtcaaaatttttgtcaaagagtctaatagagccatgcgttggttgcagcagccctaaaagcattttcatagccgtgcttttgccagcaccgttgggtcctaaaaaaccgtaaatttcattttttctaacatgaattgaaagctgattaacagctgcctcacctgaaaaatccttgcttaattgcttggtttcaatgatgtaattgttcattttgcttctcctttaaatcgtttagtgtcctgtcattcctttcttaacacttttcattatagtgaaacttctttatctcaacttactctcttccttaattctttcttaatttttgctttgaagcccttggatcagaaaaacgatatgttatactaattttatcgaggtaacagcatgaattataaagagaaaaaaatcttaattttagatgacaatccagaaattttagaaatggtgcaagagtctttaagcattgctggttttaacaacctaacaagcgtgcaatcaaaaaaagaggtcttggagcaacttggcaaaagatcctttgatttggccattttagacattatgctgcctgatggttcgggttttgaggtactaagagaaattcggaaaacttctactatgccagtattctttttgtctgcggtatccgacattgaaaagcaataccaaggttttgagttgggagcggacgactacatcgtcaaaccttttcgtcctaaggaattggagttgcgaatcctttctattttaaaaagagcctatcctgaaaaggacgatacccttattttacctacttgtcaggtcaactttagtcaagctttgattaccaaaggagaattggaaattcagctgacagctaaggaatacagtattcttaaagttttatataacaatcaaaatcgcattgttacctttgatcaactcttagaaaaagtttggggtctgcaatatcaaggctatgaaaatactatgatggcgcatattcgcaagatcaggcaaaagattgaagccaatccttctaagccagaatgtttactgacagttaagggcttgggttacaaactaaaggtgagttaaatggataccgttaaattttttacgaagttattgaccaagtatgttctattagtatttgccttaattgtaggagttatttttgtttatggcttggttttcttaacctatcttaattattatggaaaggaaaaaccagagctagtttacaccaaaatcgctcaatcgagtcaacaagatgcgttcaatattagtaaaagaagtcaaaaagaaatggataaacaaaagacttgggctatggtattaaatcaagatggtcagatcgtccaatcttatcgtttacctcaacagctcaaaagacattataccaatgctgatatggtgaaattttcgcgctggtatttagatgattatcctgttttttcctatgtacgtggtcagcagattttagtttttggctaccctaaaaagtattccctagcaaagtttaatttttatctgaatacgcaatttattaagaattttcttcatttagggtttgttttcttaggcatcatctttttatttatctttgttctttttagccattcaaagctgcgcattaaaaaggaaatagagccgattgtctctgcgctcactttcttgtcgcaaggtcaaagtgctgctcttaatgaaaaaggcaatctttctgaaattaagacagctctcaatgaaacttctcatattttagaagaaagtaatatgatgaaagaacagtggattagaggagtcagtcacgatttgcgcaacccgctgatgctgatttcaggctacaccagtcaattggaacaacaatatggtcatggaaagcaaacggagcagattgaaaatcagattcaaaatatgaaagaaatgatttctaatctcaatttgagctacctgttggataatcaaaagcgtcattccaaattttcaagtcttgatttagctgttgtcctgcgatccgtaattgctgatattctaaataattatgaaacagttatacttcattttgatttacctgcagaggcggtattggtaaagggtgatgccactttattagaaagggcttttaaaaatcttctgctcaatagtattaggcatagtggctctaatcagatcgatttgacttatcaattatttgataataaagtgattattatcattgcagataagggaactattacagctcagaaaattgtagaactaaatcaaaaatcaactaattatgagtcgcatggcatgggcaccgttatcactaagcaaatcataaaacttcatcaaggtgagactgtcttttcagataatcatccaggtttgaaagtgacgattgtcttgcctgtaacggatgaattttaattggagcatttataggtagagaagtgtttataatcaagtgattattagaatatataatcagagcttttcttttgaccatcccatgataatctatgctataataaaagttatgatttcaggaattatcaatttaaaaaaagaagcagggatgacctcgcacgacgcagtcttcaagcttcgtaaaatattaaaagaaaaaaaaattggacacgggggaaccttggatcctgatgttattggcgtccttcccattgcagttggcaaggccacacgggttctggaatacatgacagaagctggtaaggtctatgaaggtcaaataacgcttggtttttcaacaacaactgaagatgctagcggtgagcttctccaatggacaccagttgatgaaaccttgtctgtggaacttattgatcaggcgatgacatgttttatgggtcaaatcacacaagttccgcccatgtattcagccgtcaaagtcaatggaaaaaaattatacgaatatgcgcgtgcaggtcaggaagtagaacgtcctcagcgtcaagtcaggatttatgattttaaacggactagtgatttggtttttgaggatgaatgctgtcactttgattttagggtttcttgcagcaagggaacttatatcagaaccttggcggttgatttgggtcaaaaacttggctatgccagtcacatgtccttcctaaaacgaacagcatcagctggtttagatttaagtcaagctttaacattagctgaaattgctgaaaaagttgaagagaaagatttctcttttcttttgccaatagaatatggtgttcttgatttaccaagaatagacttaaatccaaaacaaaccaaagaagtttcttttggaagacgccttaaactgctccgtcaggaagaattgttagcagctttttttgaaaatcagctggttgccgttttggaaaaaagagatatctcttacaaacctaaaaaggtttttctttgagagtgatgttagaaagtattgtaaacgtacatggaaattataaaaatagacagtcataaagatattgagcaacaagaagattcggtcttggttttgggctattttgatgggcttcatagaggacataaggaactttttaaccaagctagggaaatagcccaaaagatgcaactgaaaatagttgtcttgacctttccagagtctcctcaattagctttcacgcgttttgagcccgatttactcaatcatattaattacccagaaaaacgctattgtaagtttgcagagtacggagttgactgtctttatttgacagattttacttcttcctttgcaaagatcagttctgatgattttatcaaaaactatattaaagctctgaaagctaaggctgttgttatggggtttgattataaattcagtcatagtaaagcaaattctgattatcttaagcatcattttgcggggcaagtcattaccgttcctgaagtacagtatgaggggaagaagattagttcaacgcgcgtgcgccagctcattaaacaaggtgatatgactcaagttaaccgtcttttaggctatgagttttcaacacgaggaatagtggtacacggtgatgccagaggacgtacaattggttttccaactgctaatcttgcaccgctggatcggacttatttaccagccgatggtgtttatgtggctgatgttattgtcggcaggaagcgttatcgttccatgaccagtattggtaaaaatatcacttttggaggaacggaattgcgtcttgaagctaatatatttgactttgacgatgatatttacggcgagacaattgaaattttctggctaaataaaattcgtgaaatggttaaatttaatagcgtcaatgatttggttgaacaattaaaatctgataaagaaattgcgataaattggggaaaatcatagccaagtgctttaaaatcttgtataataagaggcaagtatgaataaaggggtagtagatttatggttaccttatttttatcacctagctgtacaagctgccgtaaagcgagagcttggctgaatagacatgatgttgtttttcaggaacacaatattatgactagtcccttgagtcgtgatgaactattaaaaattttatcctatacagaaaacgggacagaagatattatttcgacacgttccaaggtttttcagaaattagatattgatgtagatgaattatccgtctcggaattaatcaatcttatttccaagaatccaagtttgcttcgccgtcctattatcatggataataaacgtatgcaaattggttttaatgaagatgagattcgtgcctttttaccacgagactatcgcaaacaagaactgcgtcaagcaactatcagagcggaagttgagggagaagatgactaagaattacgcttaccctttggatttgtcgtggagcactgaagagataacctcagtgctttcttttttaaatttggtagaaaaagcttatgaaaacagagttgaagctgctcttttgttaaaaagttatcagaattacaaaacgattgttagcagcaagtcgcaagaaaagcaaatcgatcgtaattttgaaagggttagtggttattctacctatcgagctgttcaagccgcaaaagctaaagagaaaggattcatctctcttgaaaactaaatttcaatttgctaaagaacttatttatgaagcaggtcgttatattcgtgacaatatgacaaaggatcttaccattgaagaaaagtcgacttttgatgatctggtgaccgatttagataaggctgttcaatcgttaatggttaaacgtatcaatagtacttatcctcaggatcatgtttttgcagaagaaaatgatcttgtagcggatattaataatggtgctgtctgggttttggatcctattgatggaaccattaattttgttgtacagggctgtgattttgcggttatgattgcttattatgaaaatggaataggacaatttggactcatttatgatgtcatgaatgatcttctttacaatggtggcggtcagtttgaggttaaggttaacgacaaagttttaaaaccttttcaagatagaccctttaatcgttctttgattggtgctaataatggtatgtgtgcacaaaatgttatggggattgccgatttcggtcgtcaaaccttaggtattcgcggaattggcagtgcaggtctcagtatctgccgagtcttagagggacgtctcatggcttatttttctaatatttcaccttgggactatgctgctggtagtgttatgggagaaaaattaggctatgttgctcttgacttgtacgggcaaaagcctaattacaaaacaagacaaaaaatcatgtttattcctaaaatgaagttgaaagaaattcaaaggtacatcaagtaaaagcctcatttgttaaatcaaattaggttttttggctgtttataaaagaaacgattgaaaaatatgttattacctgataaatttgtagaaaaatatcaaaccattttaggctctaaagctaaaacttttttaaagagttttgatcaagaacccatttgggcttttcggacaaatcctttaaagaaagagcagcttctttttgaagatgctattcccaataccgtttggggtcactatggcaaagtttttgggaaatcagcagagcatgtttctggtttggtttattcccaagagcctgcagctcagatggttgttcaagcggcagctcctcaaaaaggaatgaaggtgcttgatttagcagcagcaccgggaggcaaaacgactcatctgttatcctatcttgataatagtggtattttagtcagtaatgatatttcaaaaaagcgcagtagaattcttgttgaaaatgttgaacgttttggtgctcgaaatgttgttgttaccaatgaaagtcctcaaaacttagccaaggtttttgggaattattttgatttaattgttttagatgctccttgttcaggtgaaggcatgtttcggaaagatccagcagctattcagtactggcatgaagcatatccagtggaatgtgcagagcttcaaaaaaaaatcttagcagaagccatgaaaatgttagcagctggcggcaacttagtttattctacttgtacttgggcgcctgaagaaaatgaagcggttatcaggtggctgctttctcaatacgattatttagaattggtgaatgttcctaagttaaatggtatggttcaaggcattgatatgccacaagtggctcgtatgtatccccatcttttcaagggggaaggacagtttattgctaaattacgcgatagacggacgtctagaacagttcctgtcaagtctgctagaaatcggttaaaaagggaacaagagcagttgtggcaggattttgctcataaacatcttaacgttaaattagatggtttttatcaaacttttggtgataaactttatctcttgccgcatggtttacccgatatgtctcaattaaaaatcgctcgaaatggtttgcatttggggacttttaagaaaaatcgtttcgaaccctcctttgctttaggacttgccttaagaaaggatgaagttgttcaatcaatagaaattgatatagaacagtttaaggtatatacttctggaaatattattgcccttactacaaattatgaaaatggatggtatcaaattcttataaatggtaatggtctaggttttgcaaaagtagttggaaatactattaaaaattattttcctaaaggccttcgtttttaattctgaatgttatagaatacattttgaggaaataattagaattgcaaaccgtttgatttattttattgttataattaattgataaagaaaggaaagcgggtaatgaaaaagaaaaaagtaactttattcgcaatgctagccctggctagtcttgtcttagcggcatgttccaattggattgataaagggcagtcaattaccagtgttggttctacggctttgcagcctttagttgaagcttcctcggatgaatttggacatgctaacattggcaaaacagttaatgttcaaggtggaggttctggtacaggactttctcaagttcaatcaggtgccattcaaattggaaatagcgatctttttgctgaagaaaaagatggtattgatgccagtaagttagtcgaccataaagttgctgttgcaggaattgctgtcattactaacaaaaaagttaaagtatcaaatttaacccttgatcaattaagaaaaattttcacgggagaatatacaaactggaaacagcttggcgggcaagatttggaaatttcgatcatcaatcgtgctgctagttcgggttcacgtgctacctttgacagtgtcgtcatgaaaggaaaaagtgccagacaaagtcaagaacaagattcaaatgggatggtgaagtcaattgtttcacagacaccgggcgctatttcttacctcgcttttgcttacgttgataagtcagtgaaaactttaaagttaaatggttatgaaccaaccgttaagaatgtcacaactaataattggccgctctggtcttatgaacacatgtatactaaaggaaaagccaaaggtttaaccaaagaatttttaaagttcatgatgagtgacaagattcaaaaaggtgttgtgaccagaatgggttatatttctgttaatgatatgaaagtggttaagcgtgcagatggcactgtaattgctaagtaaattgaatagagaagagaataagatttctatttttcttgtttaagttcttttatattgatgtgtggaggaatcatgaaaaatcaagaacttgctaaaaagctgacatctccttccaaaaattctcgtttggaaaaattcggaaagatgattacgcttttctgcttaatcttaattgttattattgtagcaatgattcttatttttgttgcccaaaagggattgtcaaccttttttgtgaataaaatcaatcctcttaaattcttgtttgggacagagtggcagccaaatgttaaaggagctgatggtaaaccattacttggggctttaccgatgatcttaggttcctttattgtaactattttatctgctattattgcgactccttttgctattggagcagcagtctttatgactgaaatttcacctaagtacggtgccaaaattttacagcctgtcgttgagcttttggtaggaattccttcagttgtttatggttttattggtttgcaaattgtggttccgtttgtgagatctatttttggcggtactggttttgggattttatcaggggtttttgttctctttgttatgattttaccaacagtaacttttatgacagttgatagtttgaaggccgttccgaggcattataaggaagccagtcttgctatgggagctactcgctggcaaacgatttggcgtgtgattttaaatgctgctaagccaggtatttttacggccgttgtttttgggatggctcgagcttttggtgaagccttagctatccaaatggtagttggtaattcagctgttattccgacgtcattgaccacacctgcagcaactttgacatcagtcttaacaatgggaatcggtaatacggttatgggaaccgttcaaaataatgtcctttggtccttagccttagttcttctcattatgagtctggcctttaatatgctgatgagatttattacaagggaaggtaagaaaaattatgaacgctaagaaacttgataagttagctacaggtattctctacacgattgcgggtattattgttgccatcttggcttcgctcttgctctttattcttgtacgaggtttacctaatgtcagttggcactttttgacaggccgttcctcttcttatgaagctggtggcggtattggtattcagctttacaattctttctttcttttggtcgtgacattaattatttccatacctttgtctatgggagcagggatttatttatctgaatatgctaaaaagggacgtttgaccgactttgtacgtacttgtattgaaattctatcgtcccttccatcggttgttgttggactttttggctatttgatttttgttgttcaatttcaatatggtttttctattatttcaggagctttggccttaaccgtctttaatctgccacaaatgacacgtaatattgaagatagtttacgcaatgtgcaccatactcagcgcgaggctggtcttgctttaggtatttctcgttgggaaactgttttacatgttgtcattcccgaagcacttccggggattgtgacaggaattgtcttggcttctggtcggatttttggtgaagcagcggcacttatctatacggcaggtcaatcggcacctgctcttgattggggtaattggaatccacttagtgttaccagtccgatttctatttttcgtcaatctgaaactcttgctgttcatatttggaaagttaatagtgaaggcactattccagatgcgaccaaagtatcagaaggaagcgcagcagtcttacttatttttattttaattttcaatctgtctgctcgttatattggtaaaaaattacatgctaagttgacatcagcagcttaaaggagaagaaagttaatgactgaatataattggaatgaaagacatatcattacttttcctgaagaaatcttggctttgtcaacgaaagatcttcatgtttattacggcgaaaaagaagccatcaaaggaattgatatgcaatttaaaaaaaagaagatcactgctttaattggcccttctggctgtgggaaatctacttttcttcgtagtttaaatcgcatgaatgacactattgatatcgctaaagtgactggtcaaatcttatttgaaggtattgatgtcaatgccgctaatattaatgtttatgaaatgcgcaaacacattggcatggtctttcaaagaccaaatccatttgcgaaatccatctataaaaatattacttttgcttatgaacgcgctggtgttaaagataaacaatttcttgatgacattgtcgaaacctctttaaaacaagcagctctttgggaacaggtaaaagatgatcttcataaatcagcttttacactatcaggtggacagcaacaacggctctgtattgcgcgtgccattgctgttaagccagatatccttttgatggatgaaccggcttctgctttggatccaattgcaactatgcagctagaagaaactatgtctgaacttaaagaaaactatactattattatcgttacgcataatatgcagcaggcagcccgggctagtgattataccgccttcttctatttaggagatttgattgagtatgataagacaaataatatttttcaaaatgctaaattgcaatcgacaagtgactatgtatctggacactttggatagaaaggaaagagatgacagaacctattttaaaagtaaacgatctttctgtttactatggtaaaaagaaggcccttcatagtgtatctattgatttttatcctaatgaaatcacttcgttaattgggccatcaggatctggtaagtcaactttgttacgtgctatcaatagaatgggtgatctaaatcccgaggtgacagttacaggttcgattatatataatggtcacaatatctacagccctcgaacagatacagttgaattacgtaaggaaattggtatggttttccagcagcctaatccctttccaatgactatttatgaaaatgttgtttacggtcttcgtttaaaaggtgttaaagataagaaaattttggatgaagctgttgaaaaatctttggtaggtgcttccatttgggatgaggttaaagaccgtctacatgattcagcaattggtttatcaggaggacagcagcaacgtgtttgtattgctagagtgttagcaacaagccctaagattattttattagatgaaccaacttcagccttagatcctatttcagcaggaaaaattgaggatacactttatggtttgaaagaaaaatacacaatgcttgtggtgacacgttcaatgcagcaagcttcacgtatttctaatcgtacgggatttttcttagctggtgatttggtagaatatggaaataccaaagaaatgtttatgaatccgcaaaagcaagaaaccgaagactatattacaggtaagtttggatagataaattgagagatagaaaagagatgagaatatgttaagaacacaatttgaggaagagttagataagcttcacaatcaattctacgctatgggaacagaggtgctggcacagattaataaaacagttcgcgcttttgtcagtcacgatcgtgatttggcaaaagaagttattgctgaagatgatgttgtcaatgagtatgaaacgaaacttgaaaagaaatctcttgaaattattgcactgcagcaacctgtttctaatgacttaagaacagtaatcactgtccttaaagcctcaagtgacattgaacgtatgggggatcacgcctcatctatagctaaagcgactattcgaatgaagggtgaggaacgccttttagatgttgaaaagcaaatcagtgagatggggaaggccgttaaacatatagtagaagatgctttgaatgcctatattaatggcgatgacaaaaaggcttatgaaattgcagcaacagatgagattattgataattactttaaagatattcaaaatttagctgttgaagaaattaagaaagcacctaatgcggcttttgcaggaaaagaatatttccaagttctgatgtttcttgaacgtattggtgattatgcaagaaatatctgtgaatggattgtttatcttaaaactggcaaaatcattgaattatgatataatatagtcttagaattttgaataattgaggagatacatggaaactgtagagcaccttattgaaaagtttgtacctgaaaattataatattttccttgatattaaccgtcaggagaagtttttttcaggaaatgttgctattaacggagaagcgctagataatgttatttccttccatcagaaggatttaacgattcattcggtccttttagataataatgaattaacttatcatattgataatgaaaatgaggctgttcggattgaactgcctgagacaggcagtatgacccttgttcttgaattttcaggtaagattacagacaatatgacaggaatatatccttcttattatacggttgaaaatgttaaaaaagagattatttcaacacaatttgaaagtcactttgcccgtgaagtttttccaagtattgatgaaccggaagctaaggcaacctttgatttagctttgaaatttgatcaggaagaaggagacattgctctttcgaatatgccagagattaatgctaatcgtcgtcaagaaacaggtgtctggacctttgaaacaactccaagaatgtcttcttatctgctggcttttgccttaggtaatcttcatggtaagacggcctatacaaaaggtggaacagaagtaggtgttttttcaacctgtgcccataatattgactcagttgattttgctttagatattgctgttcgtgttattgatttttatgaagattattatggtattaagtatcctattgcacaggcttaccatgttgccttaccggatttctcagcaggtgctatggagaactggggattaatcacttatcgtgaggtttatcttcttgttgatgaaaattctaccgttagcagccgccagcaggttgcacttgttgttgcccatgaactggcgcatcaatggtttggtaatctggtaactatgaagtggtgggatgacctttggctgaatgaaagttttgccaatatgatggaatatgttgctattgatgctattgaaccaaactggcatatttttgaagactttcagaccagcggtgttcctcatgctttgaagcgtgatgcaactgacggtgttcaatctgtccatgtcgcagttaatcatcctgatgaaatcaatacactttttgatgctgctattgtctatgctaaaggaagccgattgatgcatatgctgcgtcgctggttaggtgacaaagtttttgctgctggactgaaactttactttgaaaagcatcaatacaataacactgttgggcgtgatctgtggaatgctttatcaaccgcttctggtaaggatgttgctagtttcatggatgcttggcttgaacaaccgggctaccccttagtgacacttaaacttgaaggagatagcctgcaactatctcaaaaacaatttttcatcggagaatatgaggatcaagatcgtctttggccaattcctcttaacagcaattggtcaggtttaccggaaatattatcggaaaaaacgattgacattcctaatttcagtcaattagctgctgtaaataaagaaaaaggaccattacgcttaaatacagataatacagctcattatatcagtaattatgaaggtcagctgttaaaatcaattttatctgattttgagaatcttgataaaacctccaagctgcaaattattcaggaacgtcgtcttctagcagaaagcggtcagatttcttatgctgaattagtaaaattgttaacacaattatctcacgaaacgtcttacatggtcgcttcagctagcgatcaattaattgctggtttaaaacgatttttagatgaagacagccaatcagaatcgatgtttaaagttcttgttcgtgatgtttatcgtacgaattatcaacgcctaggttttgaaaagtccgtggaggaaatggatgaggacgaaaaggttcgtcaaattactatttctaatatgatttatgctgatgatcctgatgccaatgaaaaagcacaagcgatttttgcaaattataaggaaaatattgaagccattccagccgctattcgtcttgacgttttaacgaatcaaataaagcatgccgaaaccgacgatttagtaagtctttatttagattcatacgttaaaacgaatgacagtaattttcgtaggcaattggccagtgctctggcaaatacgaaatcacaaataacgcttgatcgtattctagctcaattgcctaatagagatgttattaaaccgcaagatttgtcattatggtatggacttttcttgagaaaatcatttgcacaagaaaccttttggacctgggcgcgtgagaattgggcttggattaaagccacacttggtggtgatatgagttttgatagttttgtaattattccagcaaatgtctttaagacaccagaacgtctggcagaatacaaagctttctttgaacctcaattagatgatttatccatcagccgtaatattactatgggaattaaagaaatagcagctcgcataacgctaattgaaaaagaaaaagctgctgttgaacaaaccattgtcaatacttttttgtaattaagaatatagatttacatgacttaaaaagttaaataataatttgaaatgaagatttagttttgtatggaaacaggattaaatcttttttgttttatcaaaagcctgtaggcatacccactacagatactaaagtgtctgaatgtcttaaatagtaatattcaatgctactttagagattatgccaatgagtctcttccatgacagcaaattctttattaagtctcttttaagcatggttagttagactaagcatatcctataagaaagacgaggtctatcatatgaaaaaaatagtaattaaccccatttttctgtcattggcaacaaaagctgtattaaccagtttaattattattgttgcaaagggataataatctagtgtttagaaaggccaattatgaaaatttttaaatcaaaatggatgatggcttttttagctatcctaggtatggcactttgcttttctggaggctatgcaacagcaaaattaactcagacgaagcctactatgcctaaaaatgtcaaaaaaggtactccgcctaaaggtgctccggaagatactccacctaatggcaattcaaatgattcatcgcaatcggatagtgattccgattctaatagtagcaatacgaattcaaattcttccataacaaatggctagtcgaaatatctcaagtcatgctataatagaaagtaaaaaaggagtaaaatatgataaagttattattagtagaagacgatttgagtctatctaactctatctttgactttctggatgattttgctgatgtcatgcaggtttttgatggtgcagaaggactgtatgaagcagagagtggcgtttatgatttgattctattagacttaatgcttcctgaaaaaaatggcttccaagttttaaaagaactgcgtgaaaaagggataacgacacctgttttgattatgacagctaaggaaggtttggatgacaaaggacacggttttgaattaggagctgatgattatctgacaaaaccattttatcttgaagaattaaaaatgcgtattcaggccctcctcaaacgttcaggcaaattcaacgaaaataatctgacttacggtgagttaaccgttgatacagcaactaatacaacaatggtaaatggaaaagaagttgaactgcttggcaaagagtttgacttattagtttatttcttacaaaatcaaaatgtcattttacctaagtcacaaatttttgatcgtatctggggctttgatagcgatacgacaatttcggttgttgaagtctatgtttctaaaataagaaagaaattaaaagacaccacatttggaaagaatttacagacattacgcagtgtaggatatattttgaaggatgctaattaaattaagaaaacaaaagcaggatgagaatatttcatttttcagtcatttctttgctgtttttaccggaatattctttgttatgacagttattattattcaggttatgcattttggtatctattcttcagttgataatagtctaaaaatagcaactgagaatgtcaatgattatgtcaatatgactctatcgcatgataatcctattactgaagctgaaaatggagatgcctcttttaaagtaaaatcaaatggccagatggctgctaatacagatactattctttatgataaaaagcataacgtcatcaataatgtcaatgccttctcttctttgtatcatattcgccctaaactaaaagatattggtgatattgttgaacaagaagctaagaatatttacggtcagaccgaaaagtatcggacagtgacagttaaggtaaataatgatttttacccacagataaaatttgcaacaattgttattaatacaacacagcttgaagaggctaatacgcgttatgttacgattattatcagtgtgatgattgttttttggcttatatcagttattgccagtgtttatttagcgaagtggagtcaaaaaccgattctggaaaattatgaaaagcaaaaatcatttgttgaaaatgccagtcatgaattacgtactcctttggctgttttgcaaaatcgcttggagagtttgtttcgaaaaccagaggctactatcttagattcttcggaatctattgcttctagtttggaagaggtcagaaacatgagaatgctgacagcaaatctccttaatttagcccgtcgggatgatggtatcaaaccagaaataacagaaattcaacctcgtttttttgatgatacttttaaaaattatgagatgatcgctcgagaaaatgggaaaaaattgcatattaccaataaggtcaaccgtcaaattaagacagataagactttgctgaagcaattaatgactattctttttgataatgctgtcaaatatacagataacgacggggaaatttggctggacgtcaagataactgatcgcagtttaattttttcagttgcggacaatggtcaaggtatttcagacgaggataagaaaaaaatttttgatcgtttttatcgcgtcgataaagccagaacacgacaaaagggtgggttcggacttggtttgtctttggcaaaacaaataacagacagcttaaaaggcagcattattgttaaagataaaaaaccacaaggagtaatgtttgaagctcgcctgcttgctaataaataaagtgttataaaaaacagattcggttaagtatgattagaagacgttattaatttttaataaataaaaaaacctcgattttgaggtttttttatttggctaatttgcttgcaagacgtgctttatcgcggcttgccttatttttgtgaatcaaaccttttgatttagctttgtcgatacttgaagaagcagcgcggaaaagctcttcattaggatttgcttcaaaagctttaatagctgaacgcatagctgatttttgagctgaattgcggttattttgtttaacgttaagttcagcacgtttaatagctgatttaatatttgccaatgtctttattacctccatattataataactataccattatatagaaaaataacatatttggcaagtctttctcactttttaaggtaaatttcatctattttatgatttttagtcttatgaagaataagctcagcacggcttcgtgtcggttcaatatatttttctagattaactaaattaatatctttccaaatgtctctggcaaagtcaagagcacctttttcccctaattttaagaaacgattgtagtaattttgcttatcatttttagctaaatcaagcagggttgcaaagcgctctagataccaattctcaatatagtcactgtcagcatcgatgtaaatagagaaatcaaaaaaatcactcatataaagacgattattctgagggttttgaaaaacattaattccttctatgataagaaagtcaggtacttcaattatttgacttttgttcggtacaatatcgtaaatttcgtgtgaataaacaggaatttcagcagactggccatttttaatagtatctaaaaagtctaatagacgttccatatcataactttcagggaaaccttttttattcaacatatgccttgaagataaaacagcattaggatataaaaaaccatctgttgtcatcaattcaacactagagtccttaaaagttctggctaacagtaattgtaaaagccgactggttgttgatttacctacagcaacggaaccagatactccgatgatgaaagggcggttgctgatatttttttgtaagaaaatacttttagaaaaagaaagattttcttgagattttttataaatttgaatcaagctaataagcggtaaataaatgtcagtcacatctttaatgcttattctatcgttgagacttttaatggaatttaattcattttcatttaaaggtggttgtgattcttgatgcaagtgctgccaagttttacgggaaattttttcaaaattaataaactcgtttgccatgaagttctcctttaaaaaatattataccacattgaattgaaaaccgtttcaaagtgtgctaaaattgattagcataaaacaggagtgaagttaaaatgaataatatgtactatacagaaaatcccgatagtaaacacgatattagaaaaataaaggttgaattactgggacagtcttttcattttttaacagattcaggtgtttttagtaaaaacatgattgactatggcagtcagactcttttaaacagccttgattttgctgaggaaaaaacattattagatctcggctgtggctatggaccgcttggcattgccttggctaaggttcaaaaacttgacgttactatggttgatattaataaccgtgctcttgatttaacccgtcaaaatgctgaaaataatgaagtatctgctaatattttccaatctgatatttatgaaaatgtttttgatagttttgattatattattagcaatccgcccattagggctggtaagaaagttgtccacactattattgagggaagtattaatcatttaaaagaaaatggcagtttgactattgtcatccaaaaaaagcaaggtgctcctagtgctaaagataagatggaaaatgtttttggcaatgcgattgttttaaaaagggataagggctattatgttcttagaagtgtgaaagaaggagattgaacacaagtagaaagcttgaatttagttggatagtttgcatcagaaattgggattttagcaagcttttaacattcacttgctttttatagcgttcttggtatcttggtgatgagagcagttgatttaattcagaaaaaacgtgatgggctgacattgacacaggaagaaatttcttggcttattgaaggatatgttaatggccaagttcctgattatcaaatgtcagcacttgctatggctatctattttaaaggaatgagcactagagagacgcaagatttgaccatggctatggttaagtctggtcaacaaattgatttatcagctattgccggaataaaggttgataaacattccacaggtggtgttggtgataaggtcaccttaattttagtaccgctagtagccagttttggagtgccggttgctaaaatgagcggtcgcggactgggacatactggcggaacccttgataaattggaatcaatcaagggttatcaggtcgagcgttcacaagcagatttcattaagcaggtccaagatattggcttggcggttattggtcagtctaatgatttggtcaaagccgataaattactctatgccttgcgtgacgtcacagcaacagttgatacaatgcccttgattgctagttcgattatgagcaagaagattgccgcaggggcggatcgtattttattagatgtgacagtgggtgatggtgcttttatgaaaactttaaaagaagctgaagatttatctcaaaccatggttaatttaggtaaagaagtggggcgtcagaccattgctgccattacagatatgagtcaacctttgggacaagctatcggcaatcgcttagaagttttagaagccttacaaattatgcaggggaaaggccgtaaggatattactgattttatttgtcagctggctcaattacttttagaattggcaggacaaaagagaagtctgactgaaatcaaggaacatttgatcaatggacaggctcttcaaaaatttgaagacatggttgcttatcaaggtggtgacttaaacgatctctatcgtccttcagctgcaaaatttgtgaccaagattcttgctgataaaaatggttatatcaaggaattacctgctttagcttttggactttttgctatgcgtctgggagctggacgagcagttaaaacggatcaacttgactatgagacaggaatcgttttttatagaaaagtcggtgatctaatccaaaagggtgacttactagcagagatttattccaatgaaaaattatcggaaaacttacttacagaattcaaaaaaaatgttaaaatagataaggaagaaatgaaagtaactgaaattttaaaaatcattacttgattattaagaaaggataacatgaaaatcaatcaatatattgaccatactttattaaaaccagaaagtaggcaagatcagattgataaactgattcgagaagctaagacatataattttgccagtgtctgtatcaatccaacttgggtttcttatgcggctaaagctcttgaaggaacagacattaaagtttgtactgttattggttttcctttaggagcaacgactagtgctgtaaaagtctttgaaaccaaggatgctattagtcatggagctgacgaagttgatatggttatcaatattggccaagctaaatccggtcattttgcttttgtcgaagaagatattcgggcagttgttgaagccagtggtgacaaattggtgaaagttattattgaaacttgtctccttacagataaagaaaaaattaaagcttgtcaagctgcagtagcagcaggtgctgatttcgttaaaacatcaactggtttttcaattgctggggctaagttagaagatgttcgtcttatgcgtcaaacggtaggacctgatgttggagtaaaggcagcaggaggaacgcgatctttagaagatgcgcaagcttttattgaagcaggtgcaacacgtattgggacatccgctggagttactattatggaaggaaagcaaacaaacagtggttattgatttaatcagaacagctattgaagctagtaaaaatgcttatgttccttattcacattttccgattggagcagcacttaaaaccaagtccggtaaaatctatcaaggctgtaacattgaaaatgccagttttggattgaccaattgcggtgaacgaacagcaatttttaaagctatttctgaaggttatcgtgacttagaagaaattgctatttatggtgagacgcaaaagcctatttcgccttgtggtgcttgccgtcaagtaatggctgaattttttgaaccatctgcaaaagttactttaattgcaaagggtggtaagacggtcgtgatgacagtcgaagagttacttccttattcctttagagagttaaagtaattctattttaatttgtctgttaaacctttaggtttaatataaaatgttacaacagttgttgtttataaaatttaggagggttcatttttatgaacaagaaaattattggtttagggttaactgcagtagcagtattgggacttgctgcttgtggaaatcgtgcagctagggaaaaaggtaaggcaaagacagacttaaaagtcgctattgtcactgatactggcggtgttgatgacaaatcatttaatcaatcagcttgggaaggtttacaggcttggggcaaagataacggtcttagcaaaggaaatggttttgattacttccaatcagctagtgaatccgattatgctactaaccttgatacagcttcatcaagcggttataaattaatatttggtattggctatgctttgcatgatgctatcgaaaaaacagcagcagataataagaatattcattacgttattattgatgatgttatccaaaagaaaaacaatgtcgctagtgttacctttgctgataatgaagctgcttacctcgcaggaatcgctgcagcaaaaacaaccaaatcaaagaaggtcggctttgtaggtggtgtgaaatctgaagtgatcactcgttttgaaaaaggttttgaagctggtgtgaaatcagttgatagttctattcaaattcaagttgattacgctggttcgtttggagatgcagccaaaggtaagacaatcgctgctgcacaatatgccagtggtgcagatgttatttatcaagctgctggtggtactggtgctggggtatttagtgaagccaaagctgttaatgaaaagaaaaaagaaaataaaaaagtttgggtcattggagttgaccgagatcaagctgctgaaggtaaatatacttctaaggatggtaagaaatctaactttgttcttgcttcttctttaaaagaagttggtaaggctgttcagttgatttcaacaaacacttctaagaaaaaatttccgggcggtaaagtgacaacttatggtcttaaagataaaggagttgatttagtaccaacacatttatctaaagagggtaaaaaggctgttgatgatgctaagaagaaaattgtatctggtgatgttaaagttccagaaaaataaacttttaaaggcgatcgtgtcggtcgcttttttcaagctgagatatttatatctcagtaaaatctactaaaattagtagattttactgaagtataaaatttctgaaaggaaaagattatggcgcaacatgtcattgaaatgagagagattactaaaaaatttgatgattttgtggctaatgatcacatcaatcttgatctcagaaaaggtgagattcatgctttgcttggtgaaaatggagcagggaagtcaactttgatgaatatgcttgcaggtttgcttgaacctactagtggtagcattaagattaatggttcggctgttacgattgattcgccctctaagtcagctcaattaggtatcgggatggttcaccaacattttatgttagttgaagcatttacggttactgaaaatatcattttgggaaatgaagttgtcaaaaatggtatattagatcttaaaaaagctggccaagaaattaaagcactttctgaaaagtatggtttagctgtagatcccaatgctaagattgctgatatttctgtcggtgctcagcaacgtgttgaaattcttaaaacactttatcgtggtgctgatattttaatttttgatgaaccaacagctgttttgacaccttctgaaattcaggaattgatgactatcatgaagagtcttgtcaaagaaggcaaatctattattttgattactcataagttggatgaaattaggtcagtagctgatcgtgttactgtaattcgtcgcggtaagagtattgagacagttgaggtctctggcaccacttcacaggatttagctgagatgatggttgggcgttctgtttcatttacaatagaaaaaacgccgacaaaacctaaagaaaccattttgtctatcaaagatcttgtagtcaatgaaaatagaggaattcctgctattaaaggtttgtctttagaggttaaggctggtgaaattatcggtattgctggtattgatggcaatgggcaaagtgaattagttcaagctatcacaggattacgtaagataaaatctggtcatttaacaatcaaaggacaagatgtgaccaaactttcgacccgtaagattacagagctcagtgttggtcatgttcctgaagaccgtcatcgtgatggtctgattcttgagttaactatggcagaaaacctcgctcttcaaacatattataaggaccctctaagtcacaatggtgttttgaattatagtaaaatcaatgaacatggtcgtcacttaatgcaggaatttgatgttcgcggagctaatgaacttattccagccaaaggattttcaggcggcaatcagcaaaaagctatcattgctcgtgaggttgaccgtgatccagacttattaattgttagtcagccgacacgaggtcttgatgttggagctattgaatatattcataaacgtttaattgctgagcgtgatgaaggcaaggctgttctgttagtcagttttgaacttgatgaaattctcaacctgtcagatcgtattgctgttattcatgatggtcaaatccaaggtattgttacaccagaaacaactaataaacaagaactaggaattttaatggctggtggcagtattgaaagggaggaagtaaatgtctaagaaaacacaaaaattggtagttcctctgatttcagttatcttggggattatactaggtgccattatcatggtgatttttggctatgatcctatttgggcctatgaagggttatttcaaaaagcatttggcagtctcaaggatattggcgaaatttttcgcgctatgagccctttgattttaattgctcttggttttgctgttgcaagccgtgcgggctttttcaatattggtttatctggtcaagcctatgctggttggattgctgctggttggtttgctctagctaatcccagcctgcctcgtcccctgatgattctaatgacagtgcttattggagcagcagcaggaggtgttgtcggtgctattcctggcttcttgcgagcttatttaggaaccagtgaagtcattgtaacgattatgatgaattacattgttctttatattggcaatgctattattcaagacggctttgctaagaatattatgagaaattcagactctagtatctatgttggtcataatgccagctatcagacagaatggctgcgtgctttgacaaataattcacgaatgaatatcggctttttcttggcaatcattgctattgtagttgtctggtatttactcaataagacaactctgggatttgaaatccgttcagtggggctcaatccgcatgctagtgaatatgctggtatgtcagctaaaagaaccatcgttctttcaatgattatttcaggtgctcttgctggattaggtggagttgttgaaggattgggaacctttggcaatgtttatgtgcaaacaagttccttggctattggttttgacggaatggcggtcagtcttttggcgtctaattctccaattggtatcttcctttcagcctttttatttggagcactcagtgttggagcaccgggtatgagtattagtgatgctactcatgttggcacaccgcctgaattgataaaagtagtgactgctttgattattttcttcgttggagctcactatattattgaacattacattaaacctagaaaaaaagtggaaggtggtcagtaaaatgagtttagaaaatatgttagctcttttgatatcgtcaatgctagtttatgcgacccctcttatttttacaagtataggtggcgtcttttctgaaagatcaggtgttgttaatgtaggtcttgaaggtattatggttatgggagcttttgctggtgttgtttttaatattgaatttgctcactcttttggcaaggctactccttggattgctgctcttgtaggcggtctggttggcttacttttttctttacttcatgctctagcaacaattaattttcgagcagatcatattgtttctggtactgtgcttaatcttttagctccttctttagctgttttctttgttaaagcactgtataacaagggacagacagataatatcagtcaatcttttggtaaatttgattttccaattttgtcacatattccttttttgggtcctatcttctttcaagggactagtttagtagcctatctagctgttctcttttcagtctttgcttggttcatacttaccaaaacgaaatttggtttgcgattgcgttcagttggtgaacacccacaagctgcggatactttaggaatcaatgtttatttgatgcgttatctcggtgttatgatttcaggtcttctgggtggaataggcggagcgatttatgcacagtccatctctgtgaactttgcaggaacgaccattttgggaccaggtttcattgctttggcagctatgatttttggaaaatggaatccgataggagctatgttatcaagccttttctttggtctttcacagagtttagcagttattggcggtcaattaccttttttatcaaaaattcctacagtttatctgcaaattgcaccttatgctttaacgattcttgtattagcagtcttctttggacaagcagttgctccaaaagcggatggtattaattatattaaatcaaaataaaaatttaaaatcactcgatatacaatcttgtttgattagctcttgaaagctagcaatcaggagcttatatattgagtgattttttgattccttatcaattgtaaattatagtagagaagtccattttggagattataaagttatttttatgaaagatgagcatattctttgtaagcgtttcaacctcatgctatactaatgaagtaataattagattatattgaaaagaggatttgcttatgagtaaaatcgttattgttggagctaaccatgcaggtacagctgccattaatactgttctagataattacggtagtgaaaacgaagttgtcgtttttgaccaaaattctaatatttcattcttgggttgtggaatggcactttggattggaaaacaaatatcaggccctcaaggtcttttttatgctgacaaggaatcgttagaagcaaaaggtgctaaaatttatatggaatcgccagtgacagccattgattatgatgctaagagggttactgctttggtcaatagtcaagaacatgttgaaagctatgagaagcttattttggcaacaggatcaacaccaatcttaccacctatcaaaggtgcagctatcaaagaaggtagtcgtgattttgaagcaactttgaaaaatcttcaatttgttaaattgtatcaaaatgcagaagatgttattaataaattacaggataagactcaaaatctgaatcgtattgctgttgttggtgctggttatattggtgtagaacttgctgaagcctttaaacgcctcggaaaagaagtgattcttattgatgttgttgatacttgcttagctggttattatgatcaggatctttcagaaatgatgcgtcaaaatttggaagatcatggtattgaattagcattcggagaaactgtcaaagccattgaaggtgatggtaaagtcgaacgtattgtaactgataaagcgagccatgatgtggatatggttattttagctgtcggtttccgtcctaatactgcacttggcaacgctaaactcaaaaccttccgtaatggtgctttccttgttgataaaaaacaagagacaagtattcctgacgtttatgccatcggcgattgcgcgactgtttatgacaacgctattaatgataccaattatattgccttagcttcaaacgctcttcgctcaggtattgtagctggtcataatgcagcagggcataaattggaatctcttggtgttcaaggttcaaatggtatttcaatttttggtctcaatatggtttcaactgggttaacgcaagaaaaagcaaagcgttttggctataatccagaagtcactgcatttacagattttcagaaggctagttttattgaacatgataattatcctgttacacttaaaattgtctatgataaggatagccgactggttcttggtgcacaaatggcatctaaagaagatatgtcaatgggaattcatatgttttcattggctattcaggaaaaagttaccattgaacgtttagctctactggactatttctttcttcctcatttcaatcaaccctataattatatgatcaaagcagcattaaaagctaaatgattatgaatgaaacagtgaaaagtaattttttgtcagtttaatcgtttttcaagaaaactattgagttatctttatctatcaaattctcatacttttatcattaggtatattgctgtctgaaagtgattattatataataaaagtgaaaaggaggcgttagaaagatatggcgaatcaagatttcactaggaaaaataaaaaaccgacgacacatgataaacaaaagagattggctgaagaagaattagaaaaaagaatttctcgtcttcagttagctataaaaaaagaaaaagatcctaagttgaaacaagaaatttctcttttgctacaacagtacgaaacagagcataaaaatttattgcagaaaagtcgttttcgcacttatttaatagcatcagtatgtattataggagtaatcatagctattctctttcttatgtttttaaaagacagctctcgacctatctctaatacctcaacttctaagagaaccacagcaacgtcatctctccaaaagaaagataaaactaacaagacaaaatctgatcgtagtcaaagccagaaaactagagctgtttttccagtaaagttaagaggaacgtggtatggttatgttgataatctccaaaaagatattcaaatgaccttttctaaaaatggtgtgataaaaacagttattggttcagaaaattacacaagtagaattaaaaatatagagagagtgggcgttaatacttactgttatcattttgttaaagggacacagccaagtggtttggtggcaggagcacaactaggaggagtttacgttagatatgcttatggtgtctatattggagatggctatattaaacctttagtttggcaaacaggtgttgacagcgattttgattattctcaacctttaactaatattgggttggattaccagttgcaaaaaggaagaccttcatcacagaagtcttctcatagaaagagtagtgacagtcaagtagatacaaaaaatcttactactcaacaggttgaagattgggttatcgcaaattatctggagaatcgtaaagatagtcgttttactaaaaaagatttcactattgaaagttggaaatctgatacggatggtttggtttatgctactattaaggaaaatcatcagtctgatgcaatgaagcaagcaggagcagatcctaatactagtccaactgttgctcattatcgtattaatgctaatggagagttggaaaagtcgtcggatggtcttaacagttggactgttgttagcaggacttactacagtgattaaaacgtttaataaaaataccaagcattgtgtaatgcttggtatttttatggatttttattgtttagttacgagctgcagcagcaaattcttctttagagaaggcttcgtcaatgatagcttttaattcttttgcagaagcttgcatcttttgtttttcagcgtcgttcaaaggaatatttactggacgaacaataccatgtgcacctacgatagcgggctgaccgataaagacttcattgaaaccatattggccatcttgaaatactgaaagtggcaatatggcattttcgtcatcaagaatagccttagtgatacgagcaagggcaacagcaataccatagaaagttgcaccttttttattgatgattgtataggcagcatcgcgaacaccttcaaataagtcaatcaattcttcgccattgaaattttgaacatcttgaagatagttttcaaggttgacaccagctacattggcatgagaccatactgcaaattctgagtcaccatgttcacccataatgtaagcatggactgaacgcgcatcaacatcaagtttttcagcaagtgcttgacggaaacgagcagtatcaagtgaagtacctgagccaataactttttcggcagggaaacctgagaatttccatgtagcataagttaagatatcaactgggttagcagcaacgaggaaaataccattaaagcctgattctataacttgtgtaacaattgatttattgatggcaagatttttaccaacgagatcgaggcgagtttcgcctggtttttggggtgcaccagcagtgataacaacaaggtcagcatccgcacagtcttcatatttagctgcatagattttttttggtgaagtaaaagcaagtgcatgactaagatcaagagcgtcgccaacggctttttcaaataattgaggaatttcaataataccaagttcttgagcaattccttggttaacgagagcgaaagcgtaagatgaacctacagcaccatcaccaacaaggatgacttttttatgttgtttagttgcagtcatgttctaaacatctccttataatttattaagtatatattctatacattttcattctaacactttttgttaagaaagtcactaatatttacctttcttagcggaaaactatagtagaatagctgaaaaagagccttatttgtgatataatataaaagagttttagactagaaatgaggcattttttaatgcaagatagaaatttagtagatgtcaatttaacaagtgaaatgaagacgagttttattgactatgctatgagtgttattgttgctcgggctcttccagatgttcgcgatggattaaaacctgttcatcgtcgtattttatatggcatgaatgaattgggggttactcctgacaagccgcataaaaaatcagcgcgtattacaggtgatgtcatgggtaaataccatccgcatggagattcatctatttacgaagccatggttcggatggcacaatggtggtcttaccgtcacatgttggttgatggtcatggaaattttggttctatggacggagatggcgctgcagcgcagcgttatacagaagcgcgtatgagcaaaattgctatggaaatgcttcgtgatattaataaaaatacagttgattttgcagataactatgatggttctgaacgtgaacctttagttttaccgtcacgttttccaaatcttctggttaatggagcgacaggtattgctgttggaatggccactaatattccacctcataatttgggagaaacaattgatgcggtcaaattagttatggataatcctgacgtgacaacgcgtgacctaatggaagtactacccggccccgattttccaacaggagctcttgtcatgggaaaatcgggtatacatcgcgcctatgatacaggaaagggttctattgttttgcgtgctcgcactgagattgagcaaacgaagtcaggacgtgaacgcattgttgttactgaatttccttatatggtcaataaaactaaagtacatgagcatattgttcgcttagcacaagaaaaacgcattgaaggtatcactgctgttcgagatgaatccagccgtgaaggcgttcgttttattattgaagtccgccgtgatgctagtgctaatgttattttaaataatctttttaagttaacaagtctacaaactaattttagttttaacatgttagctattgagaagggtgtccctaaaattttgtccttgagacagattttagataattatattgaccatcaaaaagaagtcattgttagacgtactaagtttgataaggctaaagctgaaagccgggctcatatcttagaaggtttactgattgctcttgatcatctggatgaagttattaccattatccgcaatagtgagacagataccattgctcaagctgaattaatgagtcgttttgatttatccgaaagacaaagtcaagccattcttgatatgcgcctgcgtcgcttgaccggcttggaacgtgataaaattcagtcagaatataatgaccttttagcattgatcgctgatttagctgatattttggctaaaccagaacgtgttatcgccatcatcaaggatgaacttgaagatatcaaacgcaaatttgctgatcaacgccgaacagaattaatggttggtgaagtcctgtcactcgaagatgaagatttaatcgaagaagaagatgttctgattactttatctaataagggttatattaaacgtcttggtcaagatgagtttcgtacacaaaaacgaggcggtcgtggtgtccaaggaacgggcgtcaatgatgatgactttgttcgtgaactggtatcaacaagtacgcatgatgccatgctcttctttactaatcaagggagagtttatcgtctcaaaggttatgaaattcctgaatacggccgaactgcaaagggcttacctatcgtcaatttactgaaattagatgatggagaaacgattcaaaccataatcaatgtgaaatcagatgattttcatgataagtatttattctttacgactaggcaaggagttgtcaaacggactagtgtgtctgcctttggcaatattcgtcaaaatggtctcaaagcgctgagtctgcgcgataatgatgaattgatcaacgttcttttgaccaatggtcaagaggatatcattattggaacacatttaggttattctgttcgtttccaagaatctgctgtccgcaatatgggacgtttggcaactggtgtgaaaggtgttaatctcaggaaaaatgattatgtcattggtgcagatcacatagcagataatcgcaatgttctaaccattacagaaaaagggtatggtaagcaaacacctgccagtgaatacccgactaaaggacgtggtggtaaaggaattaaaactgccaatatcaccgctaaaaatggtcctctcgctggacttgtcactgtcaatgatgatgaagatatcatgattattacggatactggtgttatcattcgtacaagtgttgccgatatctctcagactgggcgttcagctatgggtgtcaaagtgatgcgcctagatgaaaatgctaagattgtaacctttgctttagtcaagtctgaagtaatagaaggcacttcactaaataataatgaaaatgagtagctagcaatgaaaaaagaacgtcaatctaggaaaaaacgaagttttttaaggacctttctgcctatccttttattagtgattggcttagcactaatcttcaatactccaattagaaatgccctaattgcttggaataccaatagatatcaggtttccaatgttagcaagaaggatattgaacgcaacaaggctgcccattcttcctttgattttaaaaaggtggaatccatcagtactcaatcggtactggcagcacaaatggctgcccagaagcttcctgtaattggcggaattgccattccagacttaaaaatcaacttaccaatcttcaaaggattagataatgttggcttaacatatggtgctggaacgatgaaaaatgaccaagtcatgggagaaaataattatgctcttgctagccatcatgtttttggtatgaccggatcttcacagatgctcttttcacctttagaacgtgcaaaagaaggcatggaaatttatctgactgataaaaataaggtttatacttatgttattagtgaagtgaaaactgtcacacctgaacatgtagaagttattgacaatcggccgggacaaaatgaagttactttggtcacttgtacagatgcgggggcgactgccagaacaattgttcatggcacatataagggggaaactgattttaataagacttccaaaaagataaaaaaagcttttaggcagtcctataatcaagtatcattttaaaacaagaaactcgctctaacgagtttcttttaggtacgacttattctgtgaggtctcatgagcattgcaaacgtaataacaaggaatcatgagaagttagttgaaccgctgctatatgtctaatagtacgtacgctggtgtgatggtgtgagaggagttagagattagcctctacttgattgtcactaatggcaatattttgaaaggaaaaacaaaaatgaaattaaaagcagttcatcatgttgctttgatagtttcggattatgataaatcttatgagttttatgttaatcaattgggttttgaagtcattcgagaaaatcacaggccgaaacgtcatgattacaaacttgatttgaaatgtggtgatattgagttagaaatttttggaaataagttaacggactctaattactgcgccccaccagagcgtatcagttggccgcgagaagcttgtggcttgagacatctagctttttatgtagaagatgttgaggcatctaggcaagagttgatagctttaggtataagagttgaagaggttcgttatgatgattatacaggtaaaaaaatggctttcttttttgatccagatggtctgcctttggaattacatgaatagtcatgaaaaattgctagttttttcagtttaaaaagctaactctcatgattaagaataagagaaagaaataagaaagggagaacgatgattttacgaaaattattaataggcggaatactttttctgacttctatagtgcctttaagtttcgttgctgctagcagcaacgattctgttcagaaggttattgatgaatcttatgttcagccagactatgttatggggtattctttaagtgaagatcagcgcagtcaaacattgaatttgttgggttatagtgctgataaggataccaatgttaaaacactaaatacaagcagctatgctaaaattatgaatgttgctgatgatccgagtttgcagttatattcatctgttaagattcaaaaattaggtaataaggaaacacttgatgtgcagattgttactcctgaaaacatcacgaaagtgacacaggatatgtatcgaaatgccgctgtaacgcttggaattgaacatgctaaaattacagttgcagcaccaattgctgtaacgggagaatcagctttagcgggtatttattactcacttgaagaaaatggtgcaagcgtttctgaagaaagtaaaaatttggctcaagaagaactcaataccctttctggaattaatgaggaaaataaaggaaaagaaagttatgatgctgataagcttaatgttgctctaacagacattaaatctgcagtggctgattcaggtgataaattgacaaaagatcaagttcgaaagattgttgagaatacgttgaaaaattacaatttaaattcttcaatgactgacaaacaaataacattaatcgttaattttgcatttaaactttcaaagagtgaggttattcacaataaagggtttaaatcaactctgaattctctaaaagacagtattgttgctaatgctaaatcaacttttaagggactcaacttaaagtttaatgctaacaaagctattgagtccggtaaaggtttttttgctaaaatctggcaatggcttgttaatttttttacaggattattttcctaaaatcataataacttccctaagttatttagtcttgttttgagtaggttaaggctaacaatccgattttttatacgtaatcttcacgattagactcttttataggttattgcgctgcaatcatagctgtttgtcctaataaggtatcctattctaattgagttaaataatttattgaaattttctgaaaatactcttgacagcttttctatcaatgttataataattgtacatcatattcagaaaactctgataatttaagttataaaaaggagaaaagtttatggcggaagaggaacgctcaacatggaaaagcaaatttaaagctatgggaccggggatccttatggcatcagcagctgttggtggatcccatattgtatcatcaacgcaagcaggcgctatttacggctggcagttggccattattgttttattggttaacttgtttaaatatccattttttcgttttggctcgcaatacacactgcaaaataataaaagtctgattgaaggctacaaagaaaaagggaaactttatttgtgggtattttttatcatgaatatattctcagccgttgtcaatacagcagctgttggaattttagctgcggcaattctttataatatcttcccgaatggatttggcctgtctatctcgcaattaacaacagcccttatcatagtaaccttggcaatgcttttaattggaggttatcgttttcttgatggcttatctaagtgggtgatgacagccttgactttggcgacaaccttggctgttgttattgctctctttaaacatagagaatatgctccagatttcacagcaccatcaccgtggcaactaacagccctgccttttattgtttctttgatgggctggatgccagctccgattgaaatttcggctatcaattctatgtggacggttgaaaagcgcaagacagcaaaagtttctctgactgatggtatttttgactttaacgttggttatatcggaacagcggttcttgcatttatcttcttggcactgggtgctttgattcaatttggttcaggccaacaagttaagagtgctagtgcagcttacattgcccagtttatcaatatgtatgaatcgtcctttggtgcttggtctcgtcttttgattgccttcattgcctttttgtgcatctttggtacaactattacagttattgatggctattcgcgtgccaataatgaaaccatgcgcttactgtttggacgaaaggaagcttcacaaaaggcgcttaatgtttggatggtctttacgtctattattgggattattattgttcttttatttgcaggtgatgttgcaactctaatgcgctttgctatgattgcgtctttcctgacaacaccagtttatgcttatttgaattattcattggttaataacaaggagcacaagctatctgtttggctgaattggttatcaatttttggtttgatttatctggctggttttgctattttctttctggtttatataactggtctactcagctaataacaagaggcactttagggtgtcttttaatttttttaaattttttgtgtgttataataatgacaggaagtaagtgattttatgccagaactttaaaagggatccgattttgccttcgaatacagtcgaacgaattagaaatattatttgatttaaaataatattgttattatttatctaagattaattacactggctagttagaggagaagaaatgagtgtgaaagttattgcaaccgatatggatggaaccttcttaaattctaaagggagttacgatcataaccgatttcagagaagcttaaaacaactgcaagaaagagatattcgctttgttgtcgcaagcagcaatccataccgtcaattgcgcgaacactttcctgattgtcatgagcagttaacttttgtcggtgaaaatggtgctaatattatttctaaaaatcaatccttggttgaagttttccagcaaagagaggatatcgccagtatcatttactttattgaagagaagtatcctcaagctgttgttgtcttatcgggagaaaagaaaggctatctaaaaaagggcgtttctgagaatattgtcaaaatgctttcacctttctttcctgttttagaacttgtgaactcgttttcccctcttcctgatgaacgcttttttaagttgaccttgcaggttaaagaagaggagtcagctcaaatcataaaggctattgctgattataaaacaagtcagcgcttggtaggaacggccagcggttttggttatattgatattattacaaaaggactgcacaagggatgggccttacagcagttattgaaacgctggaattttactggtgatcatttaatggcttttggtgatggcggaaatgatattgaaatgctaaaactagctaagtattcttatgctatggctaatgcacctaaaaatgttaaggcagctgctaattatcaagctaagtcaaatgatgaatctggagtcttagacgttattgataattatctatcttctattgattagtgcatgcaaaaaacctgttttaaacagtttttttgctatcataatggatttaaggggataaaatattggaaaatagaactgctaaaaaacgtcaaaaagaaagagggagtgctgaattgactacctatcaaatgaaacggctgcaaacttttcagaaagccaacagtaaggttaaagcggatagtatcgtatttgcaggagattccatcactgagtttttccctttgaaaaaatatctaggtcatgatttacctttagtcaatagaggaatagctgggacagattctgtttggcttttggaacatatagaagatcaagtgttgactttgagtcctgctaaagttttcttgatgattggcattaatgatatcggtagaggttatcctatgttagacattgtcgcaaggatctcgaatatcattgctcaaattaaagctaatcatattttgacaaagatttatgtattgtctgtattaccagtcaatgaatctgatcagtatgctggtaaggtaaaaatcagaaataatgcacttattcaggtgttaaatcagcatttacaggttttatctggggttaactatattgatttatatccattattgttagatgaaaaaggagaattagctgaggattatacgacggacggactgcatttgactcaaacagcctatgataaaattgctcaaaccataaaaacagacttataagaaaaaatagaaaccaaagaaaatcaaacacccaatctagtagccaagtatgttaaagatttggaaacagtgagaaggttttttgaaaaatactttgatgatcaagcaaatgagctctatcacaattgaaagaagagatttaagtcgtattttttatcttttgatgatagtgtacgtttggaaattataagcaaggaaaatattagtcatgataagctaactcaagagcatctcggctttattcacctagcttttagtgtaggtagcaaaaaaggttgataaaatgacagaatggcttaaagggatggttattataaatcttttattttaggaataaagagcaatcaaattgaaaatacaatttagtgctatcgtatgatagtatcagtatacctgattattttacaagaaaaactatttattctaaggtataatacaagtattaagataaaaaatgaattgcaattggatgaacaggtgttttaatgactaaggagacgaagttctggtgatgattattcaattttttatccattttgaaaggaatatgataaaaaatggttcaaacgctatatcttatgcgccatggagaaaccttatttaacacgcaaaagcgcgttcaggggtggtgtgattctcccttgactgatctgggaattactcaagcaaaattagtgagagattattttcaagaaaaaggaattacttttgataaagtctattcctcaacacaggagcgggcgacagatactttgaaattgattacaaatcaatcttatcaacagttgaaaggattgaaagaaatgaatttcgggatttttgaagctcaaccagaaagcttgctgcctcgttttagaactggttcgtcttcttttgaagacttactggttccttatggtggtgaagatattgctcaagtgggtaaacgtatttatgaaacaattcttacaactttgaaaaaacagtcagcccaaacgctgttgatggtcagtcatggtgcagcattatatggattgatacttgaattgaacattcaattgcctcaggatcttcgttttggaaattgtgctatttgcaagtaccagtatgagaatggtcatctgaacttgcttagtgttattgatcccttgaaaaatatttcttttgatatttaggtgattcttgtatgagtaaacatttttatttgatgcggcatgggcaaacacgctttaatgagcagcacagaatccaaggagtttgtgattcacccctgaccgaacttggtattaaacaagctcaacaagcagcagattattttaaagataagggaattgtttttgaagaaatctattcttccacacaagaacgtgcctgtgacactgcggaaatcgtttcaggacgaaaagatattattcgcttgaaaggcttgaaagaatgggattttggaacttttgaagggcaacaggaatacctcaatcctcctttgcaagctggtggtgttggttatggcgattattttgttgtccatggtggtgaatcaaatcaagacgtacgtgagcgtatgggagagactgtcagagacttgctagaaaacagctctgccaaaaccattcttgctgtcagtcacggtggcgccattgctcagttttttcgtcatactctagctgatccaccacaaattcgcggtatgcacaactgtgctatcttgcatttttactatgacaatggtgaatttgatcttttatctatttacaatccagatgatgccagttttgtttatagaaagggagaccaaagatgacaaccatttatttgatgagacatggtcagaccttattcaatgttcaaaaacgtattcagggctggtcggattcccccttgatagaagtgggaattgagcaggctaaacaagctggcaattatctcaggaaattgggtttgacttttgatagtctctactgttcaaccgctgaacgtgccagcgataccctagaattagtaacaggacggacagtatataaacgtctcaagggattgaaagagatgaactttggagcttatgaaggtcaacaagaatacctacatccaccgcgtacagttcgtcggaaaacaggtaattactatgaaaaatttggcggtgaaacagacagagctgttcaagagcgcttattaaaaacaatgacagctattgctcaagcagaagctggcaaaactgttttagcagttagtcatgcaggtgctttgtcacaattttactggctcttggcttagaagagaaattgactttctttccaagtaattgttgcgttttagaatttcactacgagactgaccaatttgatcttgtacgctttattgatactttagaagaaaaaataatcaatttataaaaggagtttagaatgataaaattaaaaccgtttccacagggatttttatggggtggtgcaacagctgctaaccaatgcgaaggcgcctataatgttgatggccgtggtttagccaatgttgacgttgtgccaatcggtgaagatcgctttccgattattgctggtaaaaagaagatgtttgactttgaagaaggttatttttatccagctaaagattccattgatatgtaccatcatttcaaagaagatatcgctctttttggagaaatgggcttcaaaacttatcgtctttcgattgcttggacgcgtatttttccacagggagatgagttagaacctaatgaagctggtttgcaattctatgaggatttgtttaaggaatgtcataaatacggcattgaaccattggtgaccataacacattttgattgccctatgcacttgattgaagaatatggtggttggcgtaatcgtaagatgttagaattttatgagcgtctttgccgtacactttttacacgatttaagggtcttgttaaatattggttgacattcaatgaaatcaatatgattcttcatgcaccatttatgggagcaggtttgtattttgaagaaggtgaaaacgaagaagaggtgaagtatcaatctgctcatcatgaattggtcgcgtcagctattgctactaagctagcacatgaaattgatccagaaaatcaagttggctgtatgttggcagctggacagtattatccaaatacttgcaatcctaatgattattggaaagctatgaaggaggatcgttctaattatttctttattgatgtccaggcgcggggagagtatcctaattacgctaaaaaacaatttgaacgtgatggtctgaatattgtcatgacgcaagaagatttacagctcttaaaagaaaatacagttgactttgtttctttctcttattattcaagccgagtggcttctgctgatccaaaaattaacgacgaaacgcaagggaatatctttgcctctattaaaaatccttacttgtcatcatctgaatggggttggcaaattgatccgctcggtcttcggattactcttaataccatttgggatcgctatcaaaagccaatgttcattgttgaaaatggtcttggagcaattgatgagccagatgaaaatggctatgttgaagacgattatcggattgattacttgcgcgaacacattaaggctatgaatgctgcgattaatgaagatggtgttcagctcctaggttataccacttggggctgtattgaccttgtttctgcaggtacgggtgaaatgaaaaaacgctatggcttcatttatgttgaccgtgataatgctggtaatggcactcttaagcgctctaaaaagaaatcgtttgactggtataagaaagtcattgcttctaatggaacagacttgtagtttaaagtaaaaaaacagaacagacttaatctgtttagtctgaagaaagagtcttatttagtgatcgctttgctcgtcaataaggaaataattttaatttgtagagttttaaaaaatagtatgtttgtctatacatatatgttttgaaattctgcaaaagccaatttaaatggcattgatttgcgagcgaagcaagccctaatcgagaactttccgctgtgataaaagtggcagaagcttcactgtttctgccactcggaagatttgaacccaaggaaagtctcataaaaaaactttgtctacactctgaaacagatttttaaaaatctgtttttttagttatttcctatctttttaaggctaatttagtgtataataacagttatgaaaatcaaaaaatcttatgttgcttatcctgttttggtctttgtcatttgttatgcaattttggcaaactggtcagcaggagctaaaatattgaatacttttttgtctgctctatctccttttttaacaggagctgccattggttatattgttaacattgttatgagtgcctatgaaagactttatgataaattgattaagtcacaaagtcttttgaaggctaaacggcctttgactatggttttagcttatgcaacttttgtgcttgttgtcgttctcatttttaccattgttctaccagatttgattgccagccttaaatccttgctgtctattaacccaaaggatattcaaaatatcatcaatgaagtccaacacaataaatgggtttccaaaatgttagcatcttttggaggagatacacaaattagcagcctcatttctaattacagccgacaaattttgagtcaatttttgagtgttttaacaaatgtactaacttcggttacttcaatagcatcagctttaatttcaatttttgttagtattatcttttccatgtatgttctagctaataaagagaaattagggcgtcagtttaatcttctaattgatacttaccttggtaaatattctgggacagttcattatcttgttggtattttgcacagtcgctttcatggtttttttgttggtcagactttagaagccatgatcttaggaacattgacagctattggtatgatgctatttaacttaccttatgcagcgacaattgggatcttgattgcttttactgctctgataccggttgttggtgcttatattggtgttactattggaactattttaattttgacacagtccttctcacaggcagtcgtctttcttgtctttgttattttgctgcaacagtttgaaggcaatgtgatttatccaagagttgttggcagctctattggtttaccatctatgtgggttctgctggccattactattggcggtgctttagcaggtttagttggtatgctgatggctgtacctattttagccagcctttatcaaattattaaagatcatgtttatcaaaagcaaacacaaaaagcttcccaagagaaataatttatctcttgggtttttaagtataatacactttaaaaaaagatgggcatttttatgtttcttttgaaattaggtcttttcaatttaaatgacagcagttgtaaggataatgataccttcttaaaatctttgagttatatttttggtggataatgagttaaaagattggatgatccaattttttaaaaacaactcttaaatagtaaaaatatttgactatttaattttgtcatgttatactaaacctaattattattaggaggcttgtttacaatgaaagcagtactcgttgaacaaccgggctcatctgaacaattaaaagttgtggaaagagagattcctaaaattaaggaaggttggtctctggtaaaaattaagggattcggtatcaatcgttctgaaatttttacgcgtaagggttactcgccgtctgttgtttttccaagggttttaggcattgaatgtgtcggtattattgaagaaacatcggataaaaaccatttcttccatggacagaaagttgtttccattatgggagagatgggaagagcatttgatggcagctatgctgaatatgtccttttgccaaatgaacaaatttaccctataaaaacaaatctaacttgggataagttggcagcagctcctgagagctattatacagcttacggtgcctataaaaatttgaaattgaaaaagcaggatcttgttcttgttcgagcaggagcaagcggtgttgctttagcttttctcaatttattaaaggcttccttgcctgagatcaaggtgactgccagtgtacgttctcttgcaaaaaagaaacaacttttagatagcggctatgatgaggttattattgaccgagatagctgtttacaaacgaagcaaaaatttgataaggttttggatttgataggtcctgcttgtattgatgatactttaaaccatgttgttgatggtggtattatctgtctagttggtttattaggcggtcaatggaccttggacaattttgatcccatcatggctctgcaaaataacatttatctaacaactttctattctggcaatattaatttaaacaaattgcaagagctctttgattttattgctaaatatgctgttcctattaaggtggaaaagatttttactattgatcacattaaagaagcacatgactacttagaaagtcctcaagcttttggcaaagttattgtattgaacggagatgcctaatgacgaaatcacaaaagcagacaaagcaatatttacgtatctttgatcagcagatgtctctttatgagcattacgctcgaaagaacagtctgcaaagcaaatctctttttatccttctttggctttattataatccacaaggaatcacacaaaaacaaattgttgaaaaaacttattcaactaaacaagtggttaacgctaccttaaaaagatggaatgaaaaaaattatatcgtttttctcaagtcacaaacagatcgtcgtgaaaagaaaataattttatcttctcaaggtcaagaatatgctgcatccattattgctcctttagagaaaatggaagaagctgcctttaatagtttgtctgttcaagagcaacaaacaatgattcaattgacgggacattattatcaagctttattatcacaaatgcagctttattttgttcaaggagaaggagaaaaagctacaaaggagaagttatgattcgatttgaaaatattactaaatcttacggggataaccgggtcattgccgatcttaactttgaaattgccaagggagaattctttgttttgattggtcccagtggcagcggtaaaacgactaccctcaagatgattaatcgcttaatcactcccagtcaaggagatatttatctaaatgataaaaacatcactgacatttctttaagagaattacgtttagatatgggttatgttcttcagcaaattgctcttttccccaatctgactgtcagagaaaatattgaattgattcctgaaatgaaggcttggtcaaaagcagatcgactcgaaaaaacgaagaaattacttgataaagctggcttgccagcagataagtatttggaacgttatccacgtgacctatcaggtggtgagcaacaacgggtaggtattctacgtgccattattgcaaatccccatattcttttaatggacgagcctttttcagccttggatcctatttcgagaaaacaactacaagatttgacactctctttacaaaaagaattaggaatgacagttgtttttgtaacgcatgatattgaagaagccaaaaagttagcagatcgaattgctatttttcaaaaggggcggattattcaattggctagtcctaaagatatggcgcaaaatccggtcaatgattttgtggcagatttatttggaggtgataactaatgaccgatttaatgacaaccttccaaaatcgctttgctgactggacacagtccttgttagagcatttacaaatatctttattgtcacttttaatagccattatccttgctgttcctctggctatctttatcagtcatcgaaagagaatagcagagattattttacaaatttcagggattttccaaacgattccttctctggctcttttaggcttattcatcccttttatggggattggaacggtgccagccgtagcggctctggttatctatgccctttttccaattttgcaaaataccatcactggtctaacaactattgacccaagtttggtcgaagctggtcaagctttcggtatgaccaagtgggagcgactgaaaaaatttgaattagcgctggctatgccagttatcatttctggagtaaggacagcggctgttatgattattgggacagcgaccttggcagccttgattggagctggagggttgggttccttcattcttcttggaattgatcgtaacaacacttctctgattttaataggagctatttcttcagctcttttagctattctttttaatcttgctattaagtttttagaaaaagcttcgctgaaaaagattatgcttgccttttttatcatgttgattggtttgggcgcctcttatcttccaaatgtgattaaaaccagtcagagtcagaaagaaattgtcattgctggtaaaatgggacctgaaccagaagtcctgattaatatgtataaagaattaattgagcaagatagtcacctatcagtaaaagtcaaacctaattttggaaaaacaacctttctttatgaagccctaaaaaaaggtgatattgatatttacccagagtttactggaacaattacaagtagtcttctaaaaaatccacctaaaacgtccaataatcctcaaacagtttacgaagaagcacgtgatggtattttaaaacaggacaatcttgtctatctaaagcccatgaaatatcaaaatacctatgctgtagctgttaagaaatcatttgctaaagaaaaaggattaaagtctatttctgatttgaaaaaggttgaaaatacagcaaaagcaggatttactctcgaatttaatgaccgaaaagatggaaacaaaggattgaagagtctttatggacttaatttacaggtgagtacaatggaacctgctttgcgctatcaagcaattaagagtggtgatattgacatcactgacgcctattcaacagattcagaaatcaaggaatacgacttggttactctcaaggataacaaaaatcttttcccaccctatcaaggagctcctttattcaaaaagaaattgttacaaaaacatcctgaactaaaaaagattctgaatcgcttagctggaaaaattacagaaagtcaaatgagcgacatgaattatcaggttaaagtcaaaggaaaatctgctaaaacagtagctcatcattatctcaaaaaaacaggtttgctgaaataaaaacctaaaaagagctcaaaaaattgaaactaatatttatgctaaaagaatgcaagcataataagaaacaatctgacttagtaaaaagcaagcggcgaaaagaaaatcaccgcttgcttttaaattaatgtaaattcttttttgcgtaattcgaaaataatatcagaactatcagcaacttctcgttcatgcgtaacaataatcaccgttttcttctgctcatgggcaatctttttaaaaatagtaacaatatctttggttgttgtttcgtctagattaccagttggttcatcagcaataatgatattgtgttcgctagcgagcgccctcacgatagcaactctttgttgctgacctccggagagatgtaagacaggtttatatatcaaatcttcagaaataccaacattatcaaataatgttacaattttttcacttgttgtcttgacagatgaaatatcaagtgcggtttcaacattttgttgagctgtcatataaggcaaaagattataggattggaaaatggttgagacagcatttttacgataatcagttaagcctttttcactaatattttgattattaagaaggatttttccttttttaggactgtcaagtcctgctagaagagatagaaaagtagtttttccgctacctgattgcccgaggatagcatagactttccctttttcaaattcaagattgacttctttgaaaagataatcatcaggattgttattgtaccagtaactgaggttatttgttttcaatgtcatagaaaaacctactttctaatttgaagataaaatgtcttttggcttcatacgaataataccaatacttgccagaataattgataaaaaggtgatcagaagagcgatggcaccaagtttagcgatgctttcaggtgtctgtttaacgtttagtttattaatttgagcaacatttgcctgtgatgtgcccatcatagcaccaagaccacccctagaaggaggttgatttgatttctgactattagttttcgaaccattttgttccggaccagcatccatttgtctactttgttgacttgaagttgtctgttgagaaagaagttgatttccaactgcattaccaacaaagttaccagctacgatagcaatgactaaggaaaccaaagtaaccatgaaaagctctgcgaaaaattgaccgataatctttaaacgattttcaccgagactcataagcacgccaatttcataacgtcgttcacggatactaagaataataatcaatgttaatattactgcaccagctagggcaactaagagaacaatattttttgaaaaactagcaacattgtttaaaggtgttaacatttgttggtaaacttgatcattactttcaatggtaaatttttgcgtatcaatcttacttttggcttttttaacaaatgatttcatactagcaggatttaataaagtataagtagcagcatcaacagtattggtttgacccttcattgtatttgctgtctttagattgacatacagattattggaagggttagatgcattattttgtaattgagaagaggttacacttgaactagatttataaataccaataaccttaagagtataagttttcgctgtattgctgctatcagtagttactttgactgtaaaacgatcaccaacagcgagattgtttgctttagctaaatcagattcaataacaacgtcattatcagcagtttgacttgtgataccttttcctttagttattttgttgctaccacttgaaaaatctgaaacatttgcgcttgtattgacgccagtaatcgtaaagtcgccagaatccattttactattttgaccgctgggtccttctgaattgttcgttttgctattagaatcagaagaatttgatgaactggaactagtagatataggagtaatacttccggcactggcagttgttgttgaggtatagagataagatttaacaccaaccattttagcaacagtctgagcagttgacagagaaataggagtcatctcaaatttcgaaggttggttattgtttgattggctagatgatgattgctgagcctttttcatcatatagtcgcggctgacctgaagattgacggttgctccagcctcttttttagcattatcaacggccttatctaccgcagatttaatggtaagtccagctaatacaaagataagaatactactggtgactagagtcaagagagcagttcggctttttttagccttggttgccagccaagcacgtttgataaaattcataaggattcctccaaactaatgatgaagtcagtttatgatggttggcttaaagcagtctgaaagaaaactaaaaagagccttaaaatcaataataataggtttaaaatttcaagaagctaggatcagaatgtcccgcctttttattgtgcagtagtttttaggcttaaaactttaacagtttggaaagttgttgaagtaagagctcagtaaatgatcaattataaaacccccactaggattatgcacctagtgagggtagctttttttgaagatgattgactagcaatcatggggaaccatcccccttcctataaataaaaatagaacaattattttaaggattttctttttgaaagaagaagtccagaaagtaaaatcaagcctgttcctaaagccatcaaggctaattgattatttttttgaactcctgtatcaggtagttgagcagaaagagaattttggtctttattatcaacttcatcgcgatgagatttaaatgttgcaggaatagcctgatgaacagaggcttcctttcctttttggaatctattatcggccttgaaattagggtcaagatctttagatgactggaatgaaggtttatcactgttgtgaggagtagaagctgcatcaggggaagtgcctttttttacataccaaaaggtagtgttaggaagaaacttaacaggacttcctttataatataatacccattctcccttgccgttttttaaagatgaaaaatcgttggtattatcttcgttatcgttaccaccaaattccaattgtgcgtaccacattcccttttcattatcttgacctgaagcaagacctaagcccattccagttcccccgtctgacaaaatactgacagcgtgtccaaacgatttgaggccatcgttggggtcatcgtaaatattaaaatagtcagaaaaccagttaagcgctagatagtaggcggttgctttatcagaggcaagtgtatagccttcttgacttttggattgaatgctgctatccatatccaaatgtccatcttcggcaacccaagttaaattattagggataggtaaattagtatcatgatccaagccgtttttttcattggcttcttcgttagcccgatcttgtgcgtatttttgcataacctgatcaacagaaggcacaggaatagcaatattattgatgttgcggagttctgttaaatattcctttaagtattttgcaatttcgtttgcattaggaacgtaaggagcactaggatcgttaactacaatatattcatccctcacgccattataggttacatcagcaacattagcattttttccaaattcagttaatgtcttgttaaaattggaattgccataagcatctttcgcactataacgagtgtcttgattgttggttgcggcagcagtttgtgcttttgcagaattaactttctcttcttgatcttcagttgtagcggctgatgtttttgaaatatgatcagagtcagagcgattcgtatcagctatcgtttgatcaatttgagatgatgagtttgaatcattttgacttacgatctgttcatcagatggggaggttgctgactcttctctatctacggttgcgtctgagctttgagaagtttccgtttgttgaggagcagtttcttgttgaacgcttgttgtttgttcgggattgtccccatcagcttgcgagacagtctcagctgcgacaggctgttctattgtctcatcagcctcgattacagtacctgacgcaagggcaacaactgtagtcgttaaaatagctccacaaagcccagcaatcttactttttcgtttgctaaaaatcttctgttccattttttcctctcataaataaattattattattttaatgacattaaaataataatatagtttatcatgatttaattttattatggacacattttttttacatttctgtaaaaaatgaatacaattaagagtatatcgataaaaatagaaagttaagcagtctgacttcaagctactatgcctaatatatttgaaaaaggcaggacttttgtcctaaccttttattgttaaaatattaataagatcaatgttcggaagcaccagatgtagcatcagcagctgtttcattgctatgactgctatcagaggcaccggaagtagcatcgctacctccaccatggccactgtcagaagcaccagatgtggcatcgacaccacctgcaccaccaacaagtctttgtcctgttgtttgtagataccaatctagccaaggtttgaaattgaagacaatttcattgattcccgcaaaagaaccatcatcataatacatggcttgataattatgcgtattcaaaacagcgggatttgggcttggaataagggtacggacatactcctgattgccattgcgcaatgttccaataacccattcaacatttttcatacgccctgcaggaagcgaattatgaacagtagacaaacgatttccagactgttccgggatacgcttagcatacatggtatcaggatcttgatgggcgttattgtaatacaagaattgattattgtcatccgcataagtcaactcaaaaggcatagcttttaagaacatattgatttgatcgactgtcaaaataccatgatcaagtttaacataagcatcacctgacactgcacctgtgatttcagcgactttttcaacccattcaggatcgtcgggatcaacctcagtaatggttgtagcaataggatgattacaatccaaatcttctggttcaattggttttggtttttgcaattttgatactactccaacatagctcataaaattatctaaacaagtttcaaggaaatcaacagttccttgattaataatattaccattgtcatcaaaggcttccttagcttttccaagtaaaaattcattaccaggaagcgtgtaggcattgacgccgggtgcgtctaaaatttttctcaaatgaacctgagctcgggatgtcccttgatcataataagaagcaccaacaatcataacaggtttgttttcaaagggatggacttcacaggataaccattccaaaacactctttaaagcggcagtaatggtgtggttatgttcaggtgtagcgataattaccccgtcagcacgtataattttattgtataggagacgcaattggaaactgtctttccaactctgatcttgattgaacattggtacttcatcaatttccaacaattctagttcaaattttaatttaaattgttttctgatgtattctaacagtttgcgattgtatgattgttctgcatttgagcctacaagtcctacaaatttcatcttattttctcctttttgtttacagactttcccaattgaaattttcagcttctttatgtaaaagttcttgggcacttgatagtttctcggtgattttaacaaaaagacggaaatcgtcaaagatagcatcaagtttttggaaagtatctaaatcattaagattaccttctttgtcaaatgcttgcagagagtgagagagtaaaaattcatcaggaaggacattcgctttaatttctggcgcattaagaatttgacgaagttgcagctgagctcgagatgaaccaagggttccgtaagaagccccagtaatcatgacaggtttattaagaagcgggtaaataccgtatgacagccaagccagagcactcattaatacagctggaatagaatgatcgtattcaggtgtaccaataattacaccatctgcagcttcaattttctcagctatcttaaggatttgctctggaacttttttgtctgctggtttattaaaaataggaatatctttaatttcaagcaattcaatatcagctttatcagcaaaatgtttttgcatgtattgcagtaattggcggttggtggatttttttgagtttgtaccaactaatccaatgagtttcatatgtgtgacctctcttctttgaatttaatggaaggcagaaaaagtgtttttaagaccatctgaaacagcaagtcgattatctctagtaataataattccttcaatatgactgatttgattaattgtttccataacaaacggtattggtaaaccaaataaacgtgttgtccaaatctcaccatcaagtgataagtctgagataatactgagactagccatttgagtttctattggatagcctgtatttttatcaaaaatatggtgataatctttcccattaatctgtaggtgacgttcataaatgccagaagtaacaacagattgaccatgaattttcacaataccaatattttggtttcgtggttttttaggatcttgaatcccaatataccataaaccatttgaacgttttttattaggaccataaaccaaaagattgccacccaaattaatcatagcagaaaacgcaccttgctgttttaaataagaaatgactctatcggcaatgtaaccttttgccaaagatcccaaatcaatcttcattcccttttgggataaaaagacagtttgttttttctcatccagtctgatattttgaggatcgatcagtttcaattttttttcaatcagagatttgctggggatattggcatcgtcaaaacctatccgccaagcttgcaccaaaggtccgatagcgatattgagattgcttggctgctcaaggctatgttttttcccaattttaattaattggaacaaatcttcttgaacctgaacaggtttgatacctgccagatgattgacagccatcagttctgagtcatcactattggcactgaaacgatgttcgtaagtctttaaaagttggcaagcagtctcaacaagttctttagcattgtcggcttcaaccataagatcaatcgttgtccccatcagatgtaaagtttgttgtgcctgcaaatttttcctacctcctttagagctttctgattatatgatagcgttttctgaaaataaaatcaagctttaaataaccgaaacctaaccttttttcttcatttctccgtgaggataataggttccttccggcatgtcgttaataaaaacgtgaatcgcttctttaggtgcttttgcaacacgagatactacttcagttacttcacgagcaagctggattttttgttcttggctacggccttcaaaaaggtcaattttaacaaatggcataagtataacactcctttaatttaatagtttcattttagcatatttttgttaaaaagaagatgacaatatgtcttttatttaacaaaaaaactcagtgcgccttttgagcttttatggtaaaatggataagatatcagtttgagatggggatgacagtcttggcgcagttatattataaatatgggaccatgaattcaggtaagacaatcgaaattttaaaggttgctcataattatgaagaacaaggaaagcctgttgtcattatgacgagcagcttggacacgcgagatggatttggtgtggtggctagtagaattggcatgcgacgtgaagcagttactattacagatgacatggatatttttgcttacatcgaaaacatgtttaagaaaccttattgtattttaattgatgaaagtcagtttttaagccaaaaaaatgtttatgatctagcaaggattgttgatgaattggatgttcctgttatggcctttgggctcaaaaatgattttcagaaccatctctttgaagggtcacgtgaactcttgctgttagctgataagattgaggaaattaaaactatctgtcaattttgctccaaaaaggcaactatggttttaagaacagaaaatggcaggcctgtctataagggcaatcaaattcaaatcggcggtaatgaaacttatattcctgtctgtcgaagacattacctccatcctccaatcaaagcctgacatttttgacaggaatgacttattgatgtatcaagtccaaagaaaggttaaatgataaaatgaatatttatgatcaacttcaggcggttgaagatcgttatgaagaattaggagaattgctttcagatccagacgtcgtcagtgataccaagcgttttatggaattatcgcgagaagaagccaatagccgcgaaacagttgctgtctatcgtgagtacaagcaaatcgttcaaaatattgctgatgcgcaagaaatgattaaagatgctaatggtgatcctgaacttgaggaaatggccaaggaagagttgaaaaactccaaggtagcaaaggaagaatacgaagagaaactgaaatttctccttttaccaaaagatcccaacgatgataagaatattattttagaaattcgtggtgctgcaggcggtgacgaagccgctctttttgctggtgatcttttgaatatgtaccaaaaatatgctgaaaatcaaggctggaaatttgaggtgatggaggcttctgccaatggtgtcggcggactcaaggaagtcgttgctatggtttcaggacagtctgtttattctaaactcaaatatgaatcgggtgcccatcgagttcaacgtgttcctgtaacagaaagtcaaggtcgtgtccatacctcaacagcaacagttctcgtcatgcccgaagttgaagaagtcgaatatgaaatagatccaaaagacttgcgtgtggatatctatcatgcttcaggtgctggtgggcaaaatgtcaataaagtagcaactgcggttcgtattatccatttgccaaccaacattaaagttgaaatgcaagaagagcgcacccagcagaaaaatcgtgataaggctatgaaaattatccgtgcgcgtgtagcagaccactttgcgcaaattgctcaggatgaacaagatgctgaacgaaaatcaacagttggtacgggagaccgttcagagcgtattcgtacctataattttccgcaaaaccgtgttacagatcaccgtattgggctgacacttcaaaaattagacagtattttgtcaggcaagttagatgaagtcattgacgctcttattctttatgatcaaacacaaaaattagaagagcttaataaatgatgaattatggacaagtttttgcccaatatgtatcagaacttgaagctttgggagaagaaaaggaaagtttggcctacgtttttaaagattgtaagggttggaatcagacagattttatccttcaacagccacaagaaattgctgaagcggatctgactaaacttgaagaaatcatgcaacaattaaggcagcatatccctgctcaatatatcacaggaaaagcttactttgctgacttaatcctatcggttgatgaacgtgttttgattccaaggccagaaacagaagaattagtcaaacttatcttaaaagaaaatcagcatagaagctctgctaaacttttagacattggtacaggcagcggtgctattgctttggctcttgcaaaagctcagccagattggcaagtatgggctagcgatatttcagaagatgctcttgatttagcacaggaaaacgctactgttaatcaagcagctgtgacctttttgcagtcagatatttttagtcacatttcagataaatacgatattattgtttctaacccaccttatatttctttaagggatcaagatgaagttgaacagaatgttttggcacacgaaccccatttagcgctttttgctgataatgatggcttagctttctatcagaagttagctttagaagctgagcattatttaaaacttacaggtaagatttacttagaaattggctacaagcagggagaagcagtttctcaactttttgaaagacagttcccaaataagcgtgttcgccttttgcaggatagttttggcaaggatagaatggttgtggttgacgatggataaaattgaagaagcacttagagagggtcaggcagttgttctgccaacagaaaccgtctatggtctttttgctcaagctttgagcaaaagagctgttgataatgtttatgctttaaaaaaacggccacgcgaaaaagcaatgaacttaaacgttgcctctttagaagatattttggctttttcaaaagaggcaccagcttatttagcagaactctataaagcttttttaccgggtcccttaaccattgtcttgaaagctaacgaaaaagtgccagcttggattaatggcggtttatcaactgttggtttcagggtccccgcccaccctcaaactctagcctatatcaaacagactggtcctttaattggcacttcagctaatttatctggtcaagcaagtggtttggtttatcgggaaattcaagaggcttttgctaatcgtttattaggtattcaggatgataaggcaataaaaggaagagactcgactattttagatatttcaagttcccgagcaaagattctgagacaaggagcgcttacacaggacgctattcaagcgcatgtgaaagatataagattttaaggagaaaaaatgatttttgataaagataattatgaagagtacgatagagaagtctgggaagctattcacgcagaagaaaagcgacagcaaaacaatattgaattaattgcctctgaaaatgtggtttctaaagcagtcatgaaggcgcaggggtctattttgactaataaatatgctgaaggttatcctggccgtcgttattatggcggtacagactatgttgatgtagttgagagtttggctatcgaacgtgctaaaagactttttggtgctaaatatgctaatgttcaaccccactctggtagtcaagcgaatgctgcagcttatatggcacttatcaagcccggtgatactgttatgggcttagatttggctgctggtggtcatttgacacatggctccccagttagtttttctgggcaaacctataacttcatagcttacaatgttgatcctgaaacagaagttttgaattatgaacaaattttaaaacaggctgaagaagtgcagcctaagttaattgttgctggggcatctgcttattctcatatcattgattttaaaaaattccgtgacattgcagaccaagttggtgcaaaacttatggttgacatggcccacattgctggcttggttgctgccggcttgcatccaaatcctgtaccttatgctcatattacaacaacaacgactcataaaactcttcgtggccctcgcggtgggctcgtcttgaccaatgatgaagatttagctaaaaaaatcaattctgctatcttccctggtttgcaaggtggtcctttggaacatattgttgcggccaaggctatcactttcaaggaaaatttagatcctgcttttaaagtttatgcgcaaaaaattattgaaaattgccaagcaatggtagaagttttcaatgctcacgaaaaattccgtgttgtttctggtgctagtgaaaaccatcttttcctcgttgatgtcacacaagttgttgaaaacggtaaagtggctcagaatattttagatgatgttcatatcacattgaataaaaattctattccttttgaaaagctgtcaccgtttaaaacttcaggtattcgcattggaacagcagcagtaacagcgcgtggttttggtcctgaagaatgtcgtaaggtggctgaattgattgttaaaacccttgaaaataccgaaaatgaagcagtgttagaagaagtgcgtcaagaagttaaacttttgacagatgctttcccactttacgagaatcttgtatgatggatttgtatttaaaaaagattgtcattcaccaatttactccagatgatactgagctcattctttcggataaatgcttaactattacacctaatttagatacttattttcgaaaaaaagtaggtaaagttttttctgacgaagctaggcgtggtcagtttgatagtggtaatgtctttcttagttatttgacagataactttttagagtcctccaagaaaattgcccacctttggaaagaagaattcgttatcagtgacaatcaaaaaacgaatgatttagtttttcttcagtttgataaagagggcattgagcattttgctttcttaagactagctctaaaggagagtttaacgcatattattgatggtggcgatagccccctgcgcctgacacaaaataatttgccgtctgctgcacaaacaccagatgaagctttgattatcaatcgtcaaaatcagcagtattatcttattgaaaagcgcattaagcataatggctcttttgctaattatttttcagagaatcttcttcaagttaagcctgaacaatcggttaaaaagtccattaagatgatggaacagacagcacaaaaaattgctgataatttcaatcaagatgactttgcttttcatgcaaagatgaaagccgccatttataaaaatttggaagaagatcaggaattatcaccagaaaaattagccgatcagctctttgattccaatctgacagcgcgtttaaattttattgatgacttgaaagaaacaatcccagagtcaatcaaagtttctgatatcgatcattctcgtcaaactaaaaaattggagaatcaaaaactgtctctttccaatggaattgagcttttagtacccaatcatatctatcaggatgcagaatctgttgaatttatccaaaaccaaaatggaacttattctattttgatcaaaaatatcgaagacatacaaagtaaataatatgaaaaaaaaactaatacgaatcattcttttaggtcttctgatttttatcggatatcaaacttttactacctatcagaatgtcaaaaaagtacttgcataccgtccaatggtgcaggaagttttagatgaaaatgatactaaaaccaatgaaaatttagttttagccatgatttatacagagacaaaaggcagagaagatgatctaatgcaatccagcgaaagttcaagtggcattgctaatactattaccgatagtcgtgaaagcgttaaacaaggcataaccgttttatctgaaaatttagaagaagcgcagaataggaatacggatgtctggacggcagtacaagcttataatttcggtaaaaattatattcgttatattgctaagcatggtggtaagagtacaataaaactagccaaacgttattccaaagatgttgtagcaccaagtctaggaaataaaacaggagaaacatatcactatcataatttagtagcattctattatggtggcggtgagctttataaagacggcggcaatatctattacgctaagcaggtcaaactaaatctctccttaattaagtttgttgctgctttccaaagaaagtgagttttattgatgaaatcattacttatctattttaaggggtatctcaaagaaaccatacttggccccgttttcaaacttttagaggcctcttttgaattgctagttcccttggttattgccaaaatggttgatcgttatattcctcataatgataaaaatcatctttatttgatgattttctttctggttttattagcttgttccaatattacggtggctcttattgcccaatattgttctgctaaagcagcagtgggctatactaaacagcttagtcaaagtctttttcaaaaaatcatgcgcttgcccaaggaaaaacgcgatgaattgacaacgtcaagtttagtgacacgtttggttagtgatacctttcaaattcaaactggcattaatcaattcttgcgcctttttcttagagcaccaattattgtttttggttcagtcttgatggcttttttaattagtcccagaattaccatttggtttttcctgatgatttttgtcctttttgctttagtttatctcatgtctgttgtggtcaatcctctctatgataagattcgccgtctaactgataaaattgttggtttaactcgtgaacaattagaaggaagtcgtgttattcgtgcttttggtcaaataaaagcagaagaggagaattttcaaaaaacgaatcaagattatacggattggcaaattaaaacaggttatatttcaaccttaataacccctctgacctatttagctgtcaatgtcaccttgattgttgtcatttggcagggacaaattgctatttcacatcattatttgagtcagggaatgctaattgcgctagtcaattatttgctgcaaattctggtagagcttttaaaattaacgatgttggtttcttctttgaatcagagttttatcagcgctagacgaatcactcaggtttttgaccaagaggaagaagatgttttagcgcctttgcaatctcaactcgtttcggatgatgtccttgttaaagtgacagatatgactttttcctatcctcaggctgctaaatcagctcttgaaagaatttcttttgctgttggacaaggagaattctttggtattattggcgggactggttctggaaagtctagtttaattcaagttctgttgcgtctttatctccctcaaaagggcaatgtcgctatttttaaggacaaaaggagtgcaaaaaccatcaaggaatggcgaaattgggttagtctggttcctcaaaaggcagaactcttcacaggaacgattcgttctaacttgttgcttagtacagaaaaacaagtcagtgatgagcagctttggcaagtgcttgatatagctcaggctagcgattttgttaatcagaagccaggaaaacttgatgcccaagtagaagcctttggaaggaatttttcaggcggacagagacagcgtttgactattgctagagctttattaaaagaagcacctttgctgatactagatgacgccacttcagctcttgattatttaacagaagcaaaactcttacaggctatcaaggataattttaagaagacgacacttattatggtatctcaaaggactaacagtctttctaaggcagataatattttggttttggatcaaggaaagcaagtggcattagccgatcatgctaagcttttacaaacctgttcgctttatcaggaaattcattactcgcaacatccgcaagaggaggttgtcaaatgaaagctagaaataataaaaataccttaaagcgcttgactgctgactttcttaagcagagaattttggtttttcttgccttattgggtactttgattcaggtcagcctaacggtttatctcccagttctaattgggcaagcagttgatgctgttcttgctaaaaatgtccagaaaatcttaccgacaatcttgattagcatgattcttgttgttgcctttaataccattatccaatggatcaatcccttgacttacaatcgtttggttttcacttatagccaggagcttcggcagaatatcattgaaaaactttatcgcctccctttatcttatttggataagcattcttcaggtgatttagtcagtcgtataacaacggatgttgaacaattatccaacggacttttaatggtttttaatcagtttttcgtaggtattttgactattttgttaaccatcataacaatggcgaagctagacttttttatgatgattttggtactggtcttaacaccactttccttatttgttgctcgttttattgctcaaaagagttatcatctttatcaaagacaaaccagagccagaggagcatttactcaacatattgaggagagtcttcgtcaggaaagtttgattcaaagcttcaatgctcaagatcaatttattcacacttttgatcatctaaatagcaaatatgctaagtattcacaaggtgctattttctattcatctacagtcaatcccgcgacacgttttatcaatgccttaatttatgcgctcttagctggtatcggagcattacgcattatgaatgggaattttactgtggggcaattgaccactttcttgaattatgtcactcaatataccaaaccctttaatgacatttcagccgttctatctgaattacaaagtgctttagcatgtgcagaacgtctctatatgattcttgatgaaaaggatgccaaagatgatggcaagaaagaattagtcagtgaatctgttaaaggtgctattacctttgataagattagttttggttatgatgagaaacaaactctgattaagaatttgtctgtcaacattccacaaggttccaaggtggctatcgttggtcctacaggggctggaaaatcaactctcattaatttgctgatgcgattttatgatttgcgagaagggcaaatactgctagatgggcaagcaatcactgattatagtaaagtttcttatcgtcagcagattggtatggtcttacaagaaacttggctgaaaacggctactgttttggaaaatattgcctttggttatcctgaagctagccgcgagcaagtgattgcagcggcaaaagcagctaatgccgacttttttataaaacaacttcctcaaggttacgatacttttttggccgatgcaggagaatccctatcacaagggcaaaggcaattgttaacgatagcacgaatttttgttcatattcctaaaatattaatcttggatgaagcaacttcctccattgatacacgaacagaaatcttggtccaagaagcatttgaaaagcttatgaaaggacggaccagctttattattgcacatagattgtcaactattcaaagcgcagaccttatcttagttatggtagatggcaatattgttgaacaaggaaatcataaagacttgatgcagaaaaaaggtgtctattatcaaatgcagacagcacaggatagccttaaaagctaataatcattatcatcagattagtttttgatagtaaatattctttgaatataaagtaaaaaatgcttgaaatacgttttaaacgcgtcattcaagcattttaattttaacttaattttcaagaaacgaagcactatccgacgaaatcattgatttctttttcgatattagcaattttaacttgcgcatcttctgaattattaccaacagttgcgatgtagaatttgattttcggctcggtacctgaaggacggacagcaatccaagacgcatctgataggatatatttaagaacattgcttggaggagtcgttaatttttcaataccatcagcagttgtagcagtttgagcttggaagtcttctaatttaacgacatctgttgcgttaaattgtttcggagcatcaccacggaatttatccatgattttcttaatctctgtagcgccatcaacacctgacagagtaactgaaatggttttttcagcgaagtagccgtattctttgtaaatttcatcaatgccatcagcaagtgttaaaccgcgtgagcgatagtaggctgcgatttcagcaacaatcaacacagcttgaatagcgtctttatcacgaacaaaaggtttaataaggtaaccaaagctttcttcaaagccgaacatgtaagtgtggttgtgtttttcttcgaattcttgaatcttttcagcaatgaatttgaaaccagtcaagacattaaacatagttgcgccataactttcagcaattttgctaactaattcagttgatacaattgatttacaaagagcagcattagtaggtaaacttccagccgttttgtgcgcttcaagaatgtacttagcaatgatagcaccgatttgattgccagaaagattcttataagatccatcagcttggcgaatttcaacgccaagacgatccgcatctggatcggttgcaacgagaacatcagcatcaacctgacgtcccaattcttcagccaaacgaaaagcctcttgattttctggatttggtgatttaacggttgaaaaatcaggatctggcactgcttgtgcttcaaccacttgaacagaatcgaaaccagcttgtgccaaagcacgacgagccagcatttcaccagtaccatgaagtggggtgtagacaattttcatgtctttaccgtactcgtcaatcaatttttggttgatattgacatctttaacttctttgaggtactcagtatcaacagcttcaccgataacttcaattaatccagaagctttgctttcttctaaatcagctaattcaattgaaaatggatcattaatggcacgaataaaatctgttagagcatccgcatcaaaaggaggcatttgtcccccatcttcaccataaactttataaccattaaatggtgcagggttatgactggctgttaccataatacccgcaaaagttcctaaatggcgtacagtaaatgataactctggagttggacgaagagattcaaagacataagctttaataccgtgttttgctaaaacctgagcagattcaaaggcgaattcttgagagaaatgacgggaatcgtaagcaatagcaacaccgcgttttttgacgtcgtctcctttggtttcaatcaattgggcaagcccttcagttgcttgacgaacgacgtaaatattgatccgattagttccagcgccaatataaccacgcatgcccgctgtaccaaactcaagattagtatagaaagcatcttccttggtcttttcatccattgctaataattcttgatgaagatagtcgggaagtttagcataagctaaccatttttgataattttcttgatataccataataatgcaaagctcctttttgaaaatttctgttaaaatatttaaccgctttcattatatcactttcataaaaaaaaatcacgttttcacgtgattattttttaagttttaacaattttggaacgataaggaaagttagtagtgctgaaatgattaattcaataatagaattagcagaaatgatggttgccaacatagtctggatattgccgccgtaaacagatgaaaagaaaataaagatacctgtgaggacaaaaacagtattagtcgctgaaccgatagcgcctgctaaaagaagtccaaagcgattttgcattaatttataaatataataaggaaaaataccaattaaaattcgagggacaagcgctatgagtaaggagttgaaattaccatgcggcacaaaaggagaaaacagatagcttgtcggcaataaaataatagtattattaataaggctgatgattcccatcaatcctcctaaggcagatccaatacgaggaccatagacaatagaggcaacaataacaggaatgtgaacaattgttggtttgatagggactggccaaaggttaaaaatgagactcgaaagcagatgaataactagcattacggcgaaaaaaacagcaataatagcaatattagatgactttttttgatttttcatgaagcctccttcaatagtaaagtaaatttattatacaagtttactattaatctgacaagtcatttcagcaaacactataattgttcttctattttttgaatgatggtatctaaatctgctaaagcaccgcttccgacatcaccgcaagctagtacacttgacttgggctggatttccttatatccgaatttttttagcaaggcaatattgctttgcgtgataggattctcatacattttagtattcatagcaggggcaaaaaatttaggaacttctaaaggtaaagccagagctacactggttactatattatctgcaaaaccatgagcaaggtgggcaagcgtattggcagaggcaggtgctagtaaaaatagatcagcttgttttgccaatgcgatatgattaataacttgaggatcatcctctttcataacattcgaataaactggatttttagaaagcacctgcaaggttaaagggggaataaactgtttggcggcattagtcattaagacattaacatgatagcctaatttggttaattgatggcttaggtcggcagccttataagcggcaatgctaccagaaacagcaagtagaatttttttagtcattttttcttaccttttcaaaaattaaatcggcgatttcagcttttgtttctgccatgtaggcgttggtatcatctaaaagataagccagatgtttgtctgctgaaatcattgtcaaatcattagctaaaatataatccgcctgattcttttttaaactgctacgtgcgacttgaaaaagctcctctttactgacattaaccagaagtttaaaagcgattaattgtatgctagggttccattgcttgactaaactgataacctttggtgtttttttgagaaagagtacttggtaatccgcctgtgatgaaatttttctttctttattggtcttagttagaagctgaaagaggtcgcttgtttcttcgacttctatcaaatcagtcatataaatcggtgtatagtcagatactgccatactatgaatcagcacatgatgagatttaaccagcggctctaaagtctcaataaggttgttaacatcagtaatttctataattgaaagattggcgcgtttttttggtttaatggcagaagcagtggtaactagagtcacctgatgactggcagctaaaaacttctctgctattttttttcctaagcgacctgacgaatgattagtgattcctcttacttgatcgatcttttcagtcgtcccgccagatgtaatcaaaattttcatagtgttattttactgtaaatttaagatttagtaaattaaaaaatataagaaatagttgaagaaagagataaaagtaaaatccgaacattttcaattaatagtctgattaaggtgcgttttttatgaaactttgttataatgaaataaaaatataagaggagctgttatgaaaacagatattgaaattgcacaaagtgttgacttgcaacccattacaaatgttgttaaaaagttaggaattgactttgatgatcttgaactttatggtaaatataaggctaaattgacttttgataagattaaagcggttgaagaaaatgcacccggaaaacttgtcttagtaacagctattaatccaacgccggctggtgaagggaaatcaacaattaccatcgggcttgcagatgcccttaataaaatcggcaagaaaacaatgattgctattcgtgaaccttcccttggtccggttatgggcattaaaggcggcgctgctggtggtggttacgctcaagttttaccaatggaagatatcaatttgcattttacaggtgatatgcatgctattacgacagctaataatgctctttcagctcttattgacaaccatctgcatcaaggaaacgaattgggcatagatcaacgtcggattatttggaagcgcgttgtcgatttaaatgaccgtgctcttcgtcatgttacagttggtttaggcagccctataaatggcattccacgtgaggatggttttgatatcactgtagcatctgaaatcatggctatcctttgtttggcaacgaatgttgaagatctaaaagaacgcttggccaacatcgtcattggttatcgttttgatcgtagtccggtttacgttcgtgatttagaagtgcaaggagcactggctcttatcctaaaagaggctatcaagcctaacttagtacaaacgatttatggaacacctgcttttattcatggcggtccttttgctaatatcgctcatggctgcaattctgttcttgcaacctcaacagctcttcgtttagcagattataccataacagaagctggttttggagctgatcttggcgctgaaaaattccttgatatcaaaacaccaaacttgccgacaagccctgatgcagtggttattgttgcaactattcgtgccctgaagatgaatggtggtgtggctaaagatgctcttaatcaagaaaatgttgaagcggtcaaggctggttttgccaatttagcacgtcatgttgaaaatatgcgtaaatatggcgttcctgtagtagtagctatcaatgaatttatcacagatacgaacgatgaaattgctgttcttcgtaacttgtgtgcggctatcgatgtacctgttgaattagccagtgtctggactaacggggctgatggcggtgtagacttggcaaatacgcttatcaataccattgaaaataatccatcccattataaacgtctttatgataataatctttcagttgaagaaaaagtcactgagattgccaaggaaatctaccgtgctgataaagttatttttgaaaagaaagctaaaacacaaattgcccaaattgttaaaaatggttgggataacttaccaatttgtatggctaagacacagtacagtttttcagacgatccgaaattactgggtgccccaactggctttgatattactattcgtgaattggttcccaagttgggtgcaggttttatcgttgcacttacaggagatgtcatgaccatgcctggattgccaaaaaaaccagcagctcttaatatggatgtcgcagcagatggaacagcccttggcttgttctaaaattaagcaggatagttcactatcctgctttttcattagtttaaggtgaaggtgaatgtataaatgaaaataagaaatgcttgtaaagaggatgcccaacaattaattgctatttatgcctcctatgttgaaaagacagccattacctttgaataccaagttcctagcctagaagaatttaaagaacgtatcgaaaaaacaaagcaaaaatttccttatctggttgcagaagaagagggaattctgcaaggttatgcctatgcttcagcttattataatcgtgcagcttatgattggacggttgaattatctatttatatcagagaaaaagctcgtggcaagcatattggcagtcaactttatgctagtttagaaagaaatttgcaagaaactggttttgttaatctgttggtttgcattgccttacccaacaacgccagcctaacttttcataaaaaacacggctatgaacaagttgcccatttcaaaaaagtcggttacaaatttgataaatggcatgatattgtttggatgcaaaaacgtttgcttgattaagaaattatgttagaataatctttcaagctattatagaaagtaaagcaaatgaaaaagagaaaattccttattatctttctgagtctttttattatctgcctaggactaggactgttttattatagaagctctgctggacagctcaataaagcaaaatacatacaatcaaggacaccgaccattttctttcatggttatggcagcagcgctaatgcagagacgcatatgaccaatgcagctaaaaaagctggtgtgactaaaacagttattcttgcggatgttgatcaaaatggtcatgttaccttggtaggaaagattcctaaaaatgcgattaaccctattgttaaagtgaattttgctgacaatcgcaatgctgactatgacactgatgctaaatatgctaaagctgttgttagcaaattgcaaaaaaactatcattttaagaaaatgaacatggtaggccattcaatgggaaatatggcaattaatttttatatgttggctaatgctgaagacaagactttgccgcagctgcaaaagcaagttgatattgctggacattttgatggaattaaaaactatgatctcccacaaaatttaacaataaatgcaaaaacaggacagcctaatgcgatgacagcagcctataagcgactcttaaaattgcaagaacgctatcctaaagatcaagttgatgttctaaatttatatggcgacaaaggagatggttcggatggtattgtgaccaatgattcttcacgaactttgaaatatcttattggtgaaagagccaaatcttaccaagagcatcgctttactggtaaacttgctggtcatagcaaattacatgaaaatcctcaagttgataagttcctcattaatttcttatggggaaaatagaaacatatcactaacttttcaaaattaaagataaaatttaaaaagtaagccaaggcttgctttttcttataggagtctaatttgagaggtccttttatcaagcatgtacatgtatgtgtaaaaaaatttttaaaaatttcttaagcaacttagaaagaatttatgcaacttgacataaaaactgttgtcaagaaaattgcttttgatatacttattttacaaaaggagagagtgtccgtgaagttaaagttggaaaagattaaaaacggagatgacgaaattgtcattcgttataaaaagatgaatcccaccattgaagaaattgtcaatttaacctctcgccaaaaagaaaaactactagccaaaggtgagaaaggaaatacttttttatggctagacgacattctgtattgtgaacgtgttgatggcattgtctttgcttatacaaaaaataaggtttatcaaatctttcatagtttaagagatttggaagcaagctactatcggttaggttatgttcgttgttccaaatcaatgattgtcaatatctataaaattcactatttcaatagtgaaccttatggaagaattcgtgcaactatggaaaacaaggaagaaattatcatttcacgaaagtatgctaacagaattcgaacgattttacaggaaaggggtcaagatgaagagtagatggaaaggttttttaagtagggaaattgctattgattataaaacctgcatttataccttgtgccttttgatctttgatgctggttttcaattatggcaccatcagtatcacattagtattctttttctcattgaaatgattacttgtgcctatattgtgacttatgttcaagtctatctttttaatgattttgatgaagctaagcatcttgctttaaaagaatggctaggacttgtggttagtattattctttatgacctaatagcttatctattgggttggtttggtcgaggaaatataagctggattttagggctttttagcatttatctatttatttgttattttagcgtttatatagctaataaaatcaagcgaaaaattgatactaatcgtttaaatcaactgttagaagactataaaaagaagaagtgaggatatgagatggaatattcatcaaaagcaacagttcttgaaatagagcatctgcaaaaatattataagaaaaatattggggttaaagatatttctttatctgtcaaaaaaggagagatttttggttttcttggatcaaatggtgcaggaaagtcaacgactattcgctgtctcttggggctgattaagccaagtggcggtcagatgacacttttcggaggccgttatggatcgctgactgaaagcctccatcatattggttatatgccatcggaagccatgttttatccaaccatgaaagttaaagatgttatcgcatttgcagctaaagttcgtaaaaaagactgtagccaagaggccaaacgcttgtctgaacttttagaggttccttcagataaaaaaatagaagaactatctttaggaaatcgtaaaaaagttagtattgtctgtgccttgcagcatcaaccagaccttattattttagacgaaccaacatcagggttagatcctttaatgcaagagcgcttttttaaattgattaaggaagcttgttccaaaggagctacttgtttcttgtcctctcatgttttatcggaaattaagaattattgtgatcgtgttgctattcttaaaaatggtgaaatagtaacagttgatgctattcatcatttgacacacagcatgttgcggaaagtgtctgtttggaaagacggtaagttgaagactttcaattatagcggttctatgaaagatttgcttaaacagcttgaggaaatgaatcctgatgatcttttgatagaagaaccatcactggaatcattatttttacattactatgaggagaaagacaatgaccatactatatcatgaaataaaatcaaattggcgtaccttacttatctggtctctcagtatcggcatcttttcttgtgcttgtatcctgctgtttgataatgtcgctgatggtatgaaagatgctgcaacttctttttccaaaatggggagtttttcgacagctttgggtatgaataaactcaatatttctaccttaaatggttattatgcaacacaaatcgctatgattgttgctattggcggtgctatgtttgctggtatgactggggctctcatgctttctaaggaagaagaaggacacacagcagagtttctctataccttgccacttagcaggacctctattgttgtaaagaaatatttcagtctctttatattagttgccctttttaatgttattgtcatgggactcgacttattagctcttgtctatctaggaaaatcatttgattttgatgcttactatatctatcatctgcttgcctttttaatgcaatttgagatagctagtatttgctttatgatttctgcaataagtaaacgaaaaccaatcggtttagcgttaggaatcgctattatggcttacttattggatgtgatgtgccgcattatttccaagataaaatttgtcaaatatgtcactcctttttattatagcaatgccagtgatatttttgttaagactaagccagcagctatccatataataatcgcttgtcttgttattatatgcacttttatcaactcacttttaatcaatcaatcgcgtgatattagtagttaagtaatagtgttgcagataatgaaataattatgccctagctttcaataaaaaactagggttttaatgtgcgtataaaaagccaacagacaaaggttgttggcatttaacatttaatgtttaaagtattattcccactcaacagttgctggtggtttgctggtaatgtcgtagacgatgcggttgacgtgttccacttcgttgacaatacgaacagagatcttttggagaacctcccaaggaatacgggcaaagtctgctgtcatgccgtcaatagaagtgatggcgcgaatagcgatggtatagtcataggtacgaccatctcccataactccgactgaacgaacgccagtattgacagtaaaatattgccaaatatcacgattcaggcctgctgcagcaatttcttcgcgtaaaatagcgtcagattcacgaaccgtttcaagtttttcagcagtaatttctcccatcacacgaatagcaagtccaggtcctgggaagggctgccgccaaacgatttcatctggcattcctaaagcagtccccagagtacgaacttcatccttgaacagtgtgtttaacggctctattaattcaaactgcatgtcttctggaagaccaccgacattgtggtgtgatttaatggtttgggctgtttctgtgccggattcgatgacatctgtataaagcgttccttgtgccaagaaatcaacgcctttttgtttgctggcttcatcatcaaaaacatagacaaattcattcccaatgattttacgctttttctcaggatcatcaataccagcaagaagatccaaaaagcgtttggaagcatcaacacgaataatattgagtccaaatctaccacccaacatttccataacctgatcgccttcacccttacgaagaaggccatgatcaacgaagatacaggttaattggtcacctatagctttttgcaaaagcacgccaacaacagaagagtccacaccgcccgaaagccccagaagaaccttacgattaccaacttgttcacggattttttcaatttccatatcaatgaaactgtccattgaccaatcacctttggctttacaaacattaaaagcaaaattgcgtaaaatcgcattaccatattccgtatgacgaacttctgggtgaaattgaatgccaaagattttcttttcgacattttcaatggcagcataagggcagtcgcttgattcaccaaccaattgaaagccttcgggaatttcagtaacagcatcgccatggctcatcaaaacagtttgttcagcaggagtttccttaaaaagctctgaattttctatcaaatgaagggtagactgaccatattcactattgccagtttgtccagcaggaacaactttaccgccaagtttttctgtaagaagctgcataccataacaaatacctaaaacggggattccaagatcaaggatttccttatcaatgtcaaaggcatcttcagcataaactgaacttggtcctcctgaaaggacaataccaattggattgatagcacggacttcgtcggctgttaccttatggcttctcaattcagaaaaaataccaaattcacgaatgcggcgtgcgatcagctgattgtactgactgccgtagtcaagtacgataattttttgaatatctttaatatcagtcattatctccctttcttctacagttttactagacttactagtaaaagacataatcactttattttagcacaatttatgagatttgacagtaggttttgtgaaaatcctcttagaggctaaaagatggtggcaaaataaactttacaaaatgcctttaaatttgataccattagtacgaaaaaatattttgtggttaaggagagacgatgttaccggcttatattcgcattcatgatcaaatcaaaaaagaaatcgatgaaggtctttggaaaatcggcgatcgtcttcctagcgaacgtgatttggcagaacgatttgaagttagccgaatgacgcttcgacaggctataacactccttgttgaagaagggattttagagcgtcgagtgggaagcggtacttacatcgctagcagtcgtgttcaagaaaaaatgcgtgggacaactagttttactgaaattgtaaaatcacaaggcaaaacaccttcgaccaaattaatttcttaccggcgggttcatccaagcgaacaagaaataaaatttttagatattaaacctaaatcttatattatccgaatggagcgagttcgctatgcagatgatattcctgttgtttttgaagtgacagctattcctgaaaagattattaagagtttcaaaaaggaagctattaccaagcatttctttaaaacgttgacagatcatggttttgttatcggaaaaagtcagcaaaccatttctgccagcaatgctaatgagatgacggctgattatttggcgatctcgcgtgggcatgcagtactaaccttggctcaagtttcctattttgaaaatggtatgccttttgaatatgtccgcagccaatatgtcggtgagcgttttgagttttatttagaaaataagtaagtaatggaaacaaaagaaagaatgattagcagtcctcgttatcaaaaggtggctattgggattgctcagcgaattgttgatgggaaatttcccttaggacaaaaaataaaatcacgttcaactttagccagctattttaatgtctcgcctgaaacagccagaaaagccattaatgttttagcagatttagatattgtttcagtcaggcaaggcagcggcgttattgttgtctcgagagataaagcaatagaatatttagaaaaatttgaagcaacagcaggcttaaaagaaatgaaacaagatattcaaagaagcctgttaaaacaaaaacaagagcttgatgctatgaataaaatgatggatacttttttatcgcaagctagcctcattcgtaaaaagtttccttttgaaccttttgaacttttgttggatcatgatagtgctaatcttaataaaagtttggcagatttaaatttatggcatcagacaggagcaactgttgtggctcttaaaagtaagggagaattacttttatcccctggcccatacgcgactgtcagaaaaggagatatcctttactttgttggagatgactttgctttttcacgaatgaaaaatctttttgacatcttatgaaacactaacttaatacgatttaaaactttggaagagctgttccaaagtttaaatttgttatgcttacttatacatgattaagaagactgatagtctctactttttagataataatgcactttaaatgagactatctgggagcaaaagaaaaccttgatttttgctttttaaggttctcttttgctctttttcttctttgacaaactgaccacactattatataatgatatggtcagttggtttttgattatgattagaaaagaggaataaagttgaataaacttgaaataaaacatctcaccaaaatttttggtaaaaaacaaaaagcagcacttgagatgattaaagaacaaaaaagtaaaacggaaatacttgaaaaaacaggagcaactgttggtgtctatgatgttagttttgatgtcaaagaaggagaagtctttgttattatggggctctctggctctgggaaatcaaccctggtgcgtcttttgaatcgtttgattgaaccttcttcaggagatgtttatattaatggtaaagacatcgctaaaatgaatacagaagaacttcgtgaagcgagacgtcacactcttaacatggtttttcaaaactttggactctttccccataaaacaatcttggaaaatacagaattcggtttagaattaagaggagttcctaaagaagaatgtattgaattagctgaacgtgctcttgataactctaatcttttagcttttaaagatcaatatcctagtcagctgtctggaggaatgcagcaacgtgtcggcttagcgcgcgctcttgctaatgatccagaaattctattgatggatgaggctttttccgcacttgatcctttgattcgtaaagaaatgcaagatgagttgttagacttacaagaaaaagtgcaaaaaacgatcattttcatcacccacgatttaaacgaagcacttagaattggtgatcgtatcgctcttatgaaagatggtcaaatcatgcaaataggtaccggagaagagatcctaacgaaaccggccaatgatttcgttcgcgaattcgttgaagatgttgatcgttctaaagttctaacagctcagaatattatgattaagcctttaacaacagctgttgaaacagatggtccccaagtcgctctcacaagaatgcataatgaggaagttagtatgttaatggcaactaatcgtcgtcgtcaattgatggggtcactttcagccgaagctgctattgaggccagacgtaaggggctttctttaaaggaggccgttgatcctaacgttcgaactgtttctaaagatacagttattacggatattatgcctttaatctatgattctgctgcaccgattgcagtgacagatgataataatcgtctattaggtgttatcattaaaggtcgagttattgaagctctcgctaatacaaaggatgatacagaagcagaaggagaggaagaatagttttgaatttaatattacaaggaaaactacctgttgctgattggattgaggatttgaccaactggttgacacataccttttctggtttgtttaatcttattcagtcagtcggaaattttattatggatgggattacaaatacactcttatttgttaatcctttactgttaattgttctagtgacgcttgccgcctttttcctagctagaaaaaaatggaccttaccaacttttaccttattgggtttgctttttatctataatcaaagtctttgggatgatttagtcaacactttcaccttagtattggtatctagttttatttctattgtgattggtattcctttaggaatttggatggcaaaaaacaatactgtcaagcaaattatcaatcctattttggattttatgcaaactatgccagcctttgtttatttaattcctgctgtcgccttctttggtatcggtatcgtacctggtgtttttgcatctgttatttttgctttgccgcctaccgttcgttttactaatcttgccattcgtgaaattccaacggaattgattgaggcagctgatgcttttggtagtacttcgcgccaaaaattatttaaagttgaactacctcttgctaaaaatacaattatggctggtatcaatcaaactattatgctggctctctcaatggtagtaacaggatctatgatcggagccccagggctaggtcgtggtgttttatctgctttacaacatgctgatatcggttcaggttttgttaatggacttgccttggtgattttagcgattgttattgaccgttttagtcagaccgccaatcaaagaacaaaagatgctaatcaaaaaaagaacaaaacaaatacaattattgctttggctgcacttgttctgtttgtctttgcgggaattgcccgactttttgttcaaggacaatcagcaggtggcggtcaaaaaattaaattatcctatgtagaatgggattccgaagttgcttccacaaatgttttagctcaggtcttgaaagatcaaggatacaaagtagaaatgactccccttgataatgccgttatgtggcagtcagtgtctaagggtgaaactgatgcaatggtcagtgcttggctaccaaacactcatggtgatcaatataaaaaatataagaataatatcgttgatttaggacctaatcttaagggagttaaattaggtctagctgtaccaacttacatgaagaacgttaatcgtattgaagatttgactgatcaagctgataaaaagattactggtatcgaacctggtgcaggcatcatgaaagctgctaacaaagcattgaaatcctacagcaatttatcagattggaaattggtttctgcttcgacaggtgcaatgacaacagctttggatcaagcatataagaataaaaaagatattgttgtaactgcttggtctccacactggatgtttgctaaatataaactgaaatatctaaaagattcgaaaaaagattttggtagtattgaaagcattcattctattacacgaaaaggtctgaagaaagatataccaaaagcaaataaaattattgacaagttcaattggacgcaaaaagacatggaagcagtaatgcttgacatcaataatggtatgtctccagaaaaagcagctaaaaaatggattaaagaacatcctaagaaggttgcatcttggacaagtaataaataagaataaggaggttagaacacaagttctgcctcttatttaattaaaagcttttgttcttttcttttctttccttacaaggtgattttaaggcttaaatatggtaaaatagagcctatggagatcgaaaaaaccaatcgaatgaatgcactttttgaattttatgcggcgcttttgacagataagcaaatgaattatattgagctatattatgcagatgattatagcttagctgaaattgctgaagaatttgacgttagtcgccaagctgtttatgataatattaagcgaaccgaaaaaattttagaagactatgaaatgaaacttcatatgtattctgactacgtcgtccgcagtgaaatttttgatgctataatgaaaaaatatcctaatgatccttatctgcagaacaagatttccatattgacgactattgataatagagactaaaagagtgacatgttttcttgacgtcgtaagaaggagttagaacatactgatttttatcacccgtctttagttagcaagccctttattaagatttaataggagaagaaatattatggcttttgaaagtttaaccgaacgtttacaaggtgtctttaaaaatttacgcggcaaacgcaaactctctgaaaaagatgtacaggaagtcaccaaagaaattcgcctcgctttattagaagctgatgtcgccttacctgtcgttaaagaatttattaagcgtgttcgtaaacgcgctgttggacatgaggttattgataccttagatccttcccaacaaatcattaaaattgttaacgaagaactgacagcagtcctcggctctgaaacggctgaaattgaaaaatcgtctaaaattccaaccattatcatgatggtcggtcttcaaggggctggtaaaaccacttttgctggcaaacttgctaataagttagttaaagaagaaaatgcacgtcctctgatgattgctgcggatatttaccgaccggctgctattgaccagttaaaaactttgggacaacaaattaatgtacctgtttttgacatggggacagagcattcagcagttgagattgtaagtcaaggtctggctcaagccaaagaaaatcgtaacgactatgttttaattgatacagccggccgtttacaaattgatgagaaattaatgactgagctgcgtgatatcaaagctttagccaatcctaatgaaattctcttggttgttgatagtatgatcggtcaagaagccgcaaatattgcacgcgaattcaaccaacaattagaggtcactggggttatccttacaaaaattgatggtgatactcgcggcggtgctgcgctttccgtccgtcaaatcactggaaaaccaattaaattcactggtactggcgaaaagattaccgatattgagaccttccatccagatcgcatgtcctctcggattttgggaatgggagacttgcttaccttaattgagaaggcaagtcaggattatgatgaacaaaagtcagctgaattagctgaaaaaatgcgcgagaattcctttgacttcaatgatttcattgaacaattagatcaagttcaaaacatgggaccaatggaagatattcttaaaatgattcctggtatggctaataatccagctcttgccaatgtcaaagttgatgaaggtgaaattgctagaaaacgcgccatcgtatcatcaatgacacctgaagaacgtgagaatcctgacctcctaactccgagccgcagacgtcgtattgcttctggttctggtaatacttttgttaatgtcaataaattcatcaaagattttaatcaggctaagaagatgatgcaaggtgtcatgtctggtgatatgaataaggtcatgaaacaaatggggattaatcctaataatatgcctaataacatggactcctcagctcttgaaggaatgatgggacaaggcggtatgccagatatgtcagggttgagcggtgctaatatggatatgagtcaaatgtttggtgggggacttaaaggtaagttcggcgaatttgctatgaaacaatctatgaagaaaatggctaaaaaaatgaaaaaagccaaaaaacgcagaaaataacaaatcactttatatcataaagaatcatttcaatagaatctacaatagtataaaatatcgttataatggtcttcccaataaaatacaaattataatcattgctttatcagttagcctcatttatattttacctttattgactattctttattgactattagtaatggagtcttaaatggcgatgacctgtattttcatattgatagaatgttgggtttatctagcatatggaaaagtccggttaattttaggactttttacaaagttgggcagggagtgaattatttttatcctttttaaagatataaaggacaagtggtaacagtagataatcggttggtatcttctgctttaagcaaatcaggatcaactgctattcatttacctaatggtattcatgaaattagggttacttattattatactgcagtagcaagagtagcatttgtcacatccatcattgtcattatcgtaactataatctatgctgttttgtatcatttgattgaaaaacataggattgcttttaagataagacaaggtttatttatctattattaatagttaaagaggtatcttatgacaaatataaaaatttccattataacagaaatttttataaatttctgttataatggaaactaaaggaggcgttttatgatttacatcgctattattggcgatctcatttcttcaaaaaccataaccaatcgccctaaaagtcaaaaacaattgcaaaatctcttaaatcaaattaataaaaaatacaaagaactattaaaatcagcttttaccattacaactggtgatgaatttcaagctttattggttcctaatcctcaaatttttcaaattattgatgagattgcacttggtttcaaaccttaccaaattcgttttggagtgggaagcggtagtattttaactgaaatcaaccccgaacagagtatcggttcagatgggcctgcttactggcatgccagagctgctattgattatattcatgataaaaatgattatggaagcaaccatttagcagttgatttagaagatacagaaacgagccaacaaatcaatgctattttagctgcctgtgaatttataaaatcaaagtggacagttactcaatacgaagtaattgacggcttattacaagcagggatttatgaggaaaaattctctcacaaaaaaatggcggaaaaacttgatttaagccccagcagtttcaataaacgtctaaaatccagcggattaaaaatatatctcagaaataaaaaggtagctacgaccttactgttaaatgccattaggaaggagaagagatgactaaactaaatgttatatcacagtttttgtcaggtaatcctgtcttaacgctccttttgatagctcattttttggctgattttcagtggcaaagccagaaaatggctgatttaaaatcttccaactggacttatcttatcagacatcttatcattgttgctttacctttaatactacttagtgttgtgattcctcattcttttttggtattatctttgatttttcttagtcatgttcttattgatagtggcaaattactgttaaactcgttctataaggataggtcatttatcaaaactaaagctgtttttcttattgatcaaagtctgcatatcattatgatgattatcttttatcaattttatacaaaagtaagtataaactggcttagtgattttcagtattttttaaagttaatgctgtttcttattctcatcactaaaccagtaaatattatttttaagcttttctttagtaaatatcaagttaaagataatattgaagatgaaaccattacaggggctggtgcgacgattggcttattagagcgattgattatgggaatttttctcttatttggacaattcgcttccattggtttagtgtttacagcgaaatctattgctcgttatgataaaattgctaagaatcaagcttttgcagaatactatcttatcggttctctatttagtattatttatgttttaatcatttatgctatctgtttaatctaaaaaaagatttagacttcttgcctgaaaaatctaaatctttttattttttgaaaagaaatgaatgaattgaacacgaataatatagtggaggtatcttatgtattcaatccattctgcaaaagaagcactattgcctagagaacgtctcatgacttatggtcctgaaagtttgagtaatcaagaattattggctatattattgcgaactggtactaaaaaggaacatgttctcaatctctcaataaaaattttaaatggtctagatagcttggccgattttcgcagcttatccttagaagaactgcaggaaattgaaggaatcggtcaagtacgatcagtagaaattaaagctatgctggaattatccaaaagaatcaatcaagctgaatacaattttaaagaacgtattttaagcagcgaacgtttagctaaaataatgatgagtgaattaggcgataagagacaggaacaccttattgctatatatcttgacactcaaaatcgtgtgataaaaaaacaagtcatttttattggcagcgtcagacgatctgttgctgaaccccgagaaatccttcattatgcttgtaaaagtatggcaacatcacttattattgtccataatcatccttcaggttcaacttatccaagcgagaatgacctgcgatttacagaaaaaataaaacgatcctgtgatgatttaggaatcgtctttttagatcatattattgtcgggaaaaaagaatattacagttttcgtgaggaaacagatcttgtttaaagttctctaacaacataattgaaaagttctcgatcctcttttcgtgattcaagcagcagttcagggtgccattgaacacctagaaaagtgatatcagaattacgagacgtcaccgcttcaatagtatcatcagtaggatcataagcaataatttccaaatcatccgcaagacgtttaatgctctgatgatggaaggaattaatcgaagtagaggtgccgtaaattttttctagagcggtatcaggcttaattagcatattttggctgagatagtcagtaggagcatcttgccaatggtgttcaatatcttgattaagtgagccacccaatgcaatattcattaattgagttccgcggcaaacagaaaaaataggtttttcttgcttaatcgtttcttcaacgagagcaaactcaaataaatcacgcgccaaataaaaatcgttatcacttgtatctttgtcttcaccataaaaaacagggtcaacattttgaccgccggttaagataagtttatcaatcattgaaacataatattcggcaaaactgggatcactgatagggataactagtggtaaaccgccagcttcctgaacccccttgacataaccagatggtgtataagaccaagtgatatcgggaaatttagcatgtggcctttcattacccgaaataccaataataggtttattcatagaatctccttatttatctttttttagaattgttcttgattcataaaatacaatagagtttgtaattcgctagttaaatcgacatattgagcaacaactccctttggcaaggaaagatgaacaggtgaaaaacacaagattcctttgatcccagcatcaataagtatattggcgacttcttgagctttactgctaggaactgttaaaatagctgtttgaacgtctgtaccaatcaatttttcttttatactagaaatgccgtaaataggaataccgtcacttgtcgtttgaccgacctgttcgttatcatctgtatcaaatgccatagcaattttcattttattacgttcatgaaaacgataattcaggagagcacgaccaatattgccaactcccacaagaaggacattcgtagttgatgtatcattgagaatatcagcaaaaaagttcattagttttttaacatcataaccaaaaccacgacggcctaactcgccaaaataagaaaaatcacgtctaactgtcgctgaatcgataccaatggcttccgctatttgcttagaacttgccttttctatattttctgaatggaagcgtttaaaaatacggtaataaagtgataaacgcttgattgtcgccttagggatagttttatcgaaagtcactgtacttcctcctttttctatatactattgtaaaaaaagtttgtgaaaaatgcaacatcttttgaagggtcttgtgatagacatttcttatatagtctttagttttttttataacaaatttgaccacccgttagacgggtggtcataattataaggggtactgttaattttgatggagtaaaagttttcttttgtttcaaaccattgatataagattgttaaaaatttctctccaatctctgtattaaactaacggctccagtatattaaacactgttagactttactttgccttttatctaactttcttttcaaaaatatcacgttcaactaaactgtccattaaaaaataaaatttatcctgaataatgtgattctcttctgatttgaaaatgttcacaagccgaagaccagacttatctgtaatagttaatttaaaagctgtcaaatctttattgattgtaatttttaacgggaaaccttctccactattaggaatcttttcaagcagacggttaaactcataatttcccaatttattttgggtaaaagttgtatcctgcaaagtaaatttctttactttagagctgattgtataactgtacttacaatcaggtaattgtattgttttttcaaaagccattttattttcctataatttctttaatttttactgctaatgccttaacctcatctggagtattcaagtctgaaaaactgatacgtattgactcttgaagccgtacagaatctaatccatattttgctatcaagacatgactgggatcaacagtaccagccgtacaagcggaaccagttgaaattgcaaatcctgctagatctaattgtgtcagtaaaatactattattataattagggaaaccaatattaataacatgaggaagagcatcttcattagaattaagatagtaatctaaaccttccaattcatctaggaataactttttgagtccgtcaatatagtttaaaacattttcctgatgaagataactatcctttaaagcttgagtaagaccaacaattccgatgagattttctgtactggcacgccgtttttcttcttgctcacccccatgaagcagattatcaaaatgaagattatcagcaacatacagaatccctaccccttttggaccatgaaatttatgagcagaagcggaaagaaaatcaatgtttagttctttaggatgaataggcagtttgccaactgtttgaacagcatcaacgtgaaaaactgcctgatgttctttaatcacattgccgatttcttgaattggcaatatatctcctgtttcattattagcaaacattatagatactaaaatcgtatcagatcgtaaagcgtctttaacttgttgcataagaattttacctttgataggattaaggtaagtcacttcaaaaccaaaacgttgttctaagtaatcaagagtatgcaaaacagaatgatgttcaatgctagttgagataatgtgtttacctttgaactgatttgctagagcataacctttaatggcagtattattgctctcagttccaccagaagtaaaaataatatttcgcgattttacatcaaaaatctgagcaacttgttgacgacgctctcttaagaccttattagccgttctaccataagtatgaatactagaaggattgccaaaaacagaagtcatcgtgtctgtcatagcgtttatgactgttgaggtgagaggagtagttgcagcattatcaaaataaatcacaacttaagcttcatctcctttacgattataagcaaacaatggacttaccggtcgtctttcatgaatgcgaatgattgcctctccaattaactcgctagcagacaaataatgtaaattgctaggtaattcttgttccgtgtaaacagaatctgtaatcaagatatctttaataggagctgcttgcaaaatttcagtggcaccgctggcaaacaatccatgactagcaacagcgtaaatttcagtagcgcccccgcgttcaacaattttggcggactctgcaaacgtttttcctgtattaagaatatcatcaattaaaatagcttttttgcctgctacctcaccgataatataaccttcttcacgcgaagaatcatcatcctgagcatagtcaataatagcaataggtgcatcaaggtattgtgctagactgcgagcacgtttaataccagaatttttagggctgaccactacaatatcttcgccatacaaaccaagattggtatagtgatcagcaaatagcggtgtagtaaataaattgtcaacaggaatatcaaagaaaccttgcacctgtacagcatgtaaatctaaggttagcacacggtcaacacctgctttaaccagcatattagcaactaattttgccgtaataggttcacgagcagcagcgatgcgatcttgacgcgaatagccaaaataaggaatgacaacattaacactgttagcacttgcgcgtttgcaagcatcaaccataattaaaagttcccaaaggtgattattaaccggataactggttgattggatgacatagatatctttaccgcgaacactttcttcaatgttaatcataatttcaccgtcagagaattgacgagaagataattttcctaatggtacaccaacaacttttgcaattttttcagcaatggctgtattagaagtcaaagaaaaaagttttaagtgtttgtcaggataagcgttagacatgttttaataggctccttttgtattctgaaatcattttatcaaaaatttccctttttttcatctctttaataaaataagaaaacaaaaactttgtccttgggtttattcagttaaagtagcagaaaaacgtgctaccttacttctagcatatttaaatttaatatggttcgcctttaaaaaagcttcaaaatcagccttacctttttgagcatcagtaacctctaattcaagttcataatcttgccgtcctgcgtagcaattatagtcaagagccataagtccgattttcgtattaatttcacgacgtgttgttgtcagatttcccaagactgttaacttgcttaagttaattcctgctcggataaggaattgctttatctcaatattaggtaattgtttgctttttataatctcttgagcctctgtcagacttaactgatgattgtattctaaatttccaatcttttttggaacctttaaagttaattctgcactatgagtaaaagttctgatgcgcagagacattttatgggtctttaactcaaaattaattgtatcaaagtaatagttggtttgtacaattggttcaacctgctgcagatagtctttgatacgattaaattcttctttagtcaaaagtgttttgtattcaatttcaatatggttcatcttttttcctttgttaagcttatttattatgatataatgaagtattcaattgaagaaaaagtctttttgagtcgcccgtaggtgaaattatccagtgaatgatttcaagaatccagagtattccatacctaagttcaggacacaagacacaaaaggcattgggcatccgcagataaaggcaaatagagagtaggaggcagaatcattgagattctaggagaactcatctttttgcagctgtccgcaacccgtcttcaattaagatttttgagtctaaagtctcaaatcttccaagtagcagaagcattgatgttcctgccatttttaacacagctaaaatcttgtttggggcttgctttgctcgcaataaaggaaattagaatcgagtttgcagagctaaaaattttttaagttgaaaaatagatctgtatacattctaattagtttaattctatacaaaagtcttatttttgacaagaaaggagggctgaaaacttatgaattgggaagaatttctggacccttatattcaggcagtaggtgaattaaaaattaagttcagaggaattcgtaagcaatttcgtaagcaaaaacgccattcaccaattgaatttgtgacaggacgtgttaaaccaatcgaaagtatcaaagaaaaaatggttttacgaggaattaaaaaggaaaacctcactcaagatatgcaggatattgcgggattaagaattatggttcagtttgttgatgatgtcaacgatgttttagagcttttacgtcaacgcaaagacatgaaagtgatacaagaacgtgattatatcaataatttaaaacccagcggttatcgctcttatcacgttattgttgaatatcctgttgatacgattagtggacaaagaattattatggctgaaattcaaatccgaacgctagctatgaatttttgggcaacaattgaacactctctcaattacaaataccatggtgaatttcctgaagatattaaaagacgtttagaattaacctccaaaattgcttttcaattagacgaggaaatgcgacagattcgcgatgacattaaggaagcacaactattatttgatgctgagactagaaagctaaacgatggtgtaggaaatagtgatgacacagatgaactttaccgataaaattaaagttgctattatagcaaatggaaaatatcaaagtaaacgcctaacagcaaaactttttgcaatattaagaaatgatgatagattttatctaaccaaaaaaaatcctgatattgttattacgattggtggtgatggtatgctcttgtctgcctttcatatgtatgaaaagtgcttggatcatgttagatttgttggtattcatacagggcatttaggtttttatactgattatcgtgattttgaagtcgataagttattagagaatttacattctgataaaggcgaaaaggcatcttatcctatcttaaaagtgactgctacgctagctgatggtcgtcagttaacatccagagctcttaacgaagctactattagaagaattgaaaaaaccatggtagcagatgtcgttatcaataaggttcattttgagcgttttcgaggagacggcatttctgtttccactccaactggaagcaccgcttataacaaatcattagggggggctgttttgcacccgaccattgaagccttacagttaacagaaatttcaagtcttaataatcgtgtctttagaacattaggaagctccattattgttcctaaaaaagacaaaattgaaatcgttcctaaacgcttagggtcttatgttctatctattgataataaaacttatacgcatcgaaatgttgctaaaattgaatatgaaattgatcgtaaaaaaattagctttgtatcaacaccaagccacactagtttttgggaacgcgtcaaggatgcttttatcggagatttcgattcatgaggtttgaattcattgctgatcgaaaagtaaaagttaaaactttcttaaaaagccatgatatttctaagattttgttagctaagatcaaatttaaaggcggtcaaatattagtaaatgatcaagaagaaaatgctatttatcttcttgatataggcgatcgggtaactataataattcccgacgaagaagcgcttgaaactttacagcccattaagcatgatttgaatattgtttatgaagatgaacattttttaattttggataaacctgctggttatgctagtattcctagcatcttacataccaataccatagccaattttgttaaatattattatctcaaaaaagattatcccaataagcaaatccatattgtaacaaggcttgataaggatactagcggtcttatgctcttagccaagcatggttatgctcatgctaggctggataagcagctgcaaaagaagaccattaaaaaacgatattatgcgcttgtttctggacaagggcaactgcctgatcaaggagagatcatcgctcctattgcaagaccggaagatagtatcattacacgctgtgttcacccttctggtaaatatgcacatacaagttataaagtattagctcgttacggtgatatcgccttggttgatattcaacttcataccggccgaactcaccaaattcgcgtacactttgctcatattggttttccccttttaggagatgatttatatggaggagaaatggggtatggtttaaaaagacaagcccttcactgccattttttgtcttttgtggatcctttttcaaaagaacataagcagtacaatagttccttgacagaagaccttgatagcgttatcatagatttacaaaaacattagataggggtatttacatatgggtattcgctctttatttggcagcttgagagaaaaaattgttagcaaaaatgtgaggatcgtttttcctgaaggaaatgatgaacgtgttgttcgggcagctgctcgtcttaaatttgaaggtttgattgaaccaattattttaggagatgcaactgaagtccgtaatttgttgacaaagctcggttttgctgatcaggactatacgatcattaatcccgaagactatacagattttgaacatatgaaacaagaatttgtagaaattcgcaaaggtaaagcaaccattgaagatgctgagcagctattgaaagacgtcaactattttggtgtgatgttagtaaaactcggtttagcagatggtatggtttctggtgctattcattcaacagcagatactgttcgccctgcacttcaaattatcaaaacgaaaccaggaatttcgcgaacatcaggtgtcttcttaatgaatcgtgaaaccactgaccaacgtttgatttttgcagactgcgctatcaatattgaaccagatgaacaagaattagctgaaattgccatcaatacagcagatacagcaaaaatttttgatattgatcctaaaatcgctatgctgagtttttctactaaaggcagtgcaaaggcttctcaagttgaaaaagttcaagaagcaacccgcattgctaaagaacttcgtcctgaaattaccttagatggagaacttcaatttgatgctgcctttgtaccgacaacagctaaaattaaagcgccggaaagtgacgtagcaggacaagccaatgtctttattttcccagatctccaatcaggaaatattggttacaaaatcgctcaacgtctgggaatgtttgatgctatcggaccaatcttgcaaggtttaaatatgccagtaaacgatctctcacgcggatcaagtgctgaagatatttacaaacttgctattatcacagctgcgcaaacccttgataatactaaataaactaaaaagacaaactccaaaataacggaatttgtcttagactagagactagaataaaaaatctaagtctcttttttacatatgagatattcaaatctgattaaatcacctttttccaaaatctttgttggataaagcaatgtaatcctccaaagagaagtagcaccataacaaccaaaacgattccaactcctaaaactgaagttttaagagaaacaataatggctaatactaataaaaagctaccaataagtaaatttccaaaaattactgccataaggaaccactggcctgaacctcttgaaaataattgcgccacattttgccaatgaagtgttaaaagacgataatcacgccagtacattaattcccccaagataaaagttgaaagtaccattccaatgataaaactgattaatagaataattggaatatttaacaaaaagaggcctattatcaaataaataaagactaagaaaccagcttgtactgctaaaagataatagaatttctgtttcaaaaatgttttaaaagaaattggtaaagtttttaaaaaggtataattttctttttctagagaaattccgacccccataaaactagtaggagttgcaataaagcttcccaaaataatgccaataataaaagcgattccgaaaaagtcagatgaaatatgttgaaaaagagatcttcctgatgaaagaatcggtcctataaatgcaatgataaaaatcaaaggcatcaaataactttggataagaagtgtcgcatctttgagagtatctaaatgatgcttgcgaagagtttgtgctaaactagcatcttttcttcttaatttaacctttttcttagtaggctgtccttcttgaatggataaaaattgttcaaaatagtgagaaataattgtacgttgaataaaaactaacaaaatgatagttatggcgattcctaaccaaaaatttaaaagacttgcggttgaaaagggattaatgacgatatcatgaaagcctctaaaataaggtagactcatcattttaacccgaccactctcatttactgattgattagtaaactgaacataaaacagtactccgatagccaaagctgttgaaaagaacattagaattgttgagatcagttttttgtgtacactcttgaccaaaacttgtccaatcaaatagatgagaataatgctgatacaattgatagcaagtaatagcagcaagaaattaataatagtcgctataatagccaataaaatagaatgcgtcatctgccagtaagcaattccaaaaagtgaaataataggcataagaaaaggaagacttcctccttgagacgaaatcaatttagctaaataaacttctttttctttaactggtaaaggaagatagagtttagtatcattactatcataaaatacagcaaagagtgttgtgaaacctgaaacaatagcaataatactaaaaagggcgacttggaaagaaaaataaccacttgatttggaataatcaactaccaaaaacatggtagagtaaacaaataaaaagagtataagtaagaagagttgctgttttaaaactgttttataagctgcaatctgcttatcagggtttttctctcgttttttttgaacagtcgttaaagcttgaggattggaatagagaatattgatttttatcaattcccaaatagttctatagctcattcctcatcacctacctttggttcttcctttcgtccagctaactcaaggtagatactttctaaatcttgattcggataattggcctttaattcttctaaagtaccaacgaaaataagtttaccatgtctaagaataccaatacgatcgcacaattgttcagcaactgataaaacatgggttgaaaagaggaccgtattgccatcttgagcatgctttttcatcatttctttcaaatcataagaggcctgtgggtcaagtcctgtcaatggttcatctaaaatccaaatatctggatttggaatgagagcaccaataacaataactttttgtcgcattccatgtgaaaagctctcgatggtttcaaattgtctatcggaaatatcaaaaaggttagctaatttagtcattcgctcttgggcaatttcttcttcaacgccataaatctttgatagaaaatgccaatattcataagctgttagatttaggaaaatatcgggagaatcaggtacataagcgattcgtttttttatcgcatcacgatgttctgttaatttgaaatcatctataaagatattgccataactcgcttcaataattgatgtcaacaaactgatagtcgtcgttttcccagcaccgttatggccaatcaacccaaaaatttcaccgttttctatagtcaaattaaggtcactaagtgcctcagttgttccataaattttagaaatatgctcaaatctaatcataaaaactcctcctttgtaagattattatactactgaaatcatacaattaaaagtctctttaaagaaaaaattgtgacaaagttttgacacgacaggagtatttctgggcaaaaatgaaataatgtgttatgattaatttaaaaagtgaaggagaatcaaaatggcagaaacagtattgattacaggtgcttcggcgggttttggcaaggctatgactgaaacttttattcattctggttaccgtgttatcggagcagccagacgcttagaaaaacttggaaaacttagagaagccttaggggaacatttttatcctttgcaattagatatgactaatacagcctctattaacaaggctttagcgaatttacctaaagaatggtcaaaaattgaacttcttgttaacaatgcaggactggctttaggtcttgataaggcttatgaggctaatttcaaggattggaaaaccatgattgcgactaatatcattggtctgacttatttaacccatcaaattttgcctgatatggttgcaagaaaatcagggcatattatcaatatcggctcaaccgcaggtacttatccttatccgggcggtaatgtttatggtgccagcaaagcctttgttaagcaattcagtttaaacctacgagcggatttggctggtactaaagtgcgagtgaccaacattgaacccggactttgtggtagcacagaattctcgaccattcgtttcaaaggagataagaagcgtgctgaacagctatatgaaggtgctcacagcattcagccgcaagatattgccaatgctgttctctggacttttcaacaacctaaacacgttaatatcaatcgtattgaaattatgccaacatcgcaaagtttcggtcctcagccagttgaaagggactattagaaagttaaacattttatgacagaaccatctattaatcttttgttttcaattgataatcgctttgttgaacagttcaaagtcaccttatattctttgtatcaaaatacttccaataaaaacttaaagatttatatgttacaaaagaagttattagccgatcataaagcaattgagcgtttttgttatcaattaggactgtcttataaaccaattattattggtgaggaggacttcaaagatgctccagttagcgatcgttatccagaaaccatttattaccgcctcttagctcaagactatcttcctaaaaacctagacaaaatcctttatttagatgccgatattctctgtcttaatgatatagcccctctctatcaaatggatatgaaaaattatatttatgcagccgctagtcatgtatcagataaaagtattactgatattgtcaacaaactacgcttgaataattttgaagcagagggttatttcaattctggtgttcttttgatgaatttagaacaatgtcggcagaagattaaaccacaagatattatgaattatatttctagaaaaggaaataccctattattaccggatcaagacgttctcaatgcactgtatggtacgaaaacgcatcttatccctgatgaaatttataattatgatgctagatataatatcatctattttactcgtagtcttggagaatgggatcttgattgggtcattgaaaatacggttttcttacatttttgtggtaaagataaaccttggagaaaagactacaagggacgctatgcagctctgtataaacattatcagcatagagttaaaatattagaaaaataagaaagaatgggagtggaagtctcctttatttttaaaagaataaaggaccactttattggctgttttgtacaaaatctatggtatggggggcttgctggctatagatgagttgaatctaatcttattaggagatattgatggcacgtattttacaaattgaagataataatgatatccagaaaattttacgagactttttttcagaagagcatgaggtaatccaagcatactcaggaaccgagggcttgcggttatttgaagcggaaaatattgacctagttcttttagacattatgctgcctggaaaaagcggtgaacaagttcttcaagaaattcgcaaagttagctctgttcccattatcatgctgactgctcttagtgataagcagatgatcagtcaatatttgcttgcaggtgctaacgattatatcgtcaaaccttttaatctcgaagaagtttatgcacgggtgacagttcaactacgtagtgtaacaaaaagccacaatccagcaactactaaacagacggctttgtcaattaaaaatatcactgtcaatcccgatacttttgaaatttcttatttagaaaaatctgtacgattaggaaagaaagaatttcagattttacatgccttgcttcagtaccctaagaaaatatttaccaaagaagacttgtatgaatcggtttggaaagagccttacttacccggtgataatactttaaatgcgcagttaagcaatcttcgcaggaaactcgcacaggttgatgatagcacagactacattgaaacaatctggggattaggtgttcgactaaaaggagaagattgatgattgtgatcttattttttggtttaagtcttgcctttattctagccataatctatcttatacgctaccatttggcagtgaaatctctgagtcaacagattgaagaaaaaataaataatactagtcagagacgttttacattgaaaaatcaacctaaaagtctcattgaattaacaaataagatcgaaaatctatttgaaaagattgaaaagacaagccttatagctcttcaggaaaagaaaaccttagatatggctattagtaacatcgcccatgatattcgaacacccttgaccattgctagcggttatactcaaaaaagtctgcataaggaaacagttgatgcagccgatttggaaaaaatttctgaaaatctgactatagtttctaaacgtcttgaagctcttttggaatatcgtcgccttacagaaggaactatccgaccgcaggtacaaaagattgcgctgtcacatcttgttaccaagagtattctttcatattacgatatgtttcaacaggttggtataacgcttgatttgcagattgaggaaaagattccatttgagacagatcctgagatttttgaatgtttttttcaaaatattattagtaatattcttaaacacggcaaaaatcaagcacagttaatcttgaagaaaacagatcaaaaaattgttctgcaaaccaaaaatatcgtccggcagcccatccagcatttggatcagctgacaacacgtttttatacagaaaacatgtcagatacggaaaaatcttcaggcctgggactttatatcacacagcatttagtggacattttaggcggagaattgattttaacaactgaagggaattggtttattttaactgtaacgctataaaaaaagaatcattgtgcattattatattttatgcacaatgattctttttataagtcttgctttttaaaaataattaaaccaaataatgcaaagatgacgataaatccgagagcaactaaagccgaattttgtgcaacagttgcatcacttgcaaggacaaagttgaaatttaagccaaagtacttaaatagttctattttagggaagaaaacggcagggaggcccaagacggcagtcccaagaataaaacttacaaagatagctacaattgagtgagtcatataaagagcaaaggtagcgatgctggcccatgcaatactgcatagtagttggataaggactgttaccgcaaaatgtgcagcgaaattatgaggtgctgtacccagaccatgaacgattgttcccaaaatgaaagctagtgcatatgagaggataaactgactaaatgagatagcaataatgacagaagctttcgcaaagaaataaccggttcgcgacacaccgcaagtaatactatttttatataatttttgatttaaatccacaccaacaacaatagcaataataattaagataaacaacactgtagtagaaatattattcgagcaattgacaagagctttaaaaccagtccaagtagtttttactttttgtggaggctggataccaacgtgccctgtatctccaaaaaaaacaccagaaataatatttaatattagaaaaaattctgaaatccaaaaacctttggagcgaaatagacgatagaaatcagcttgaattgtgtgtaacataacgaactctcctttctttattattctacaatttgtgtgaagtaatcttctaaatcttggcgtttgtagtagatttcgtcaatatcaacagcatttgcaactagttctttgacaatccctttgatactatgagattgtccgaacacatgaatttcattgtccgcgttagtgaccttaatacgataattcatttgatcctgaagaatttggctggcttcattgatatgactggtctttaaaacgatatagtcttcgctttgggtatcaaaatcagccttgctaatttccttgataatacgaccattctcaataatagcgaacttagtagccacttgataaagctcagataggatatgactggaaataatcactgtcatgtcgtgttcttcgttaagtttcttaatcatgtgccgaaattctttgatcgccacgggatccaagccattaattggttcgtctaagataagaaaatctggtttgacaatcaaagctatagctatacccagacgctgtttcataccaagtgaaaaaccacgaaattttttcttacctgtattggtaaggccaaccagcgttaaactttcgtcaatcactttgtcagcattaggaacatgccgtgccttgcagtagtagtgcagattttgtcgggcagtcaaatgattaagtgcaacaggtgtctcaatcacagaaccgacacgcttaagagcgtgtgtccattcgctctgggtgctagaaccaaagactgaaacacttccctgacttggttgaataagctttgtaatgactttgatgagagttgtcttacctgcaccatttttaccaaatagaacttgaaaatcaaataaatatcaattaattctcaaatatctctaaaaaattgccttaaataaaaggttatcgtatctttccgaaaaactataattttcttgaaaataatgtgtaagtgtgctatacttttaataatcacaattatggagctatatttaaatgagacgtgaactcttacttgaaaaaattgacgaacttaaggaacttatgccttggtatgtgctagagtattatcaatctaaattgacagttccttatagttttacgaccttatacgaatatttaaaagaatatcggcgtttctttgaatggttaattgattctggtgtctctaatgcgaataaacttgctgatattccgctggaaactttggagcatcttagtaaaaaagatatggaatcctttattctttatttacgagaacgaactcttttaaacactaaaaacaaacgtcaaggtgtttctcagacaacgataaaccgcacactttcagccttatcaagcctttataaatacttgactgaggaagttgaaaatgctgatggtgaaccttatttttatcgaaatgtcatgaaaaaggtatcaactaaaaagaaaaaggaaacattggccgcacgagctgagaatattaaacaaaagctctttttaggcaatgaaacaatggaatttttagaatatgtggattgtgaatatgaacacaaactttctaaacgcgctctttcctcttttcgaaaaaataaagaaagagatttggcaattattgctttgctgctagcatctggagttcgtctttcagaggctgttaaccttgatcttaaggatgttaatctcaatatgatgattattgaagttacccgtaagggcggcaaacacgattcggttaatgtcgctggtttcgctaaaccttatttagaaaactacattactatcagacgggggcgctacaaggctaaaaagactgatctagctttctttttatccgaatatcgtggtgttcctaatcgcatggatgcttcttctattgaaaaaatggttgctaaatattcgcaagatttcaaaatccgcgtcactccccacaaactaagacacacgcttgcaactagattatacgatgctaccaaatcacaagttttggtcagtcatcaattaggtcatgcttctactcaagtaacagacctttatactcatatcgttaatgatgaacaaaaaaatgctttagataaattataacataactatatttatgtaaatatatattaaaatgacttgatttcccatacctcatagttagtatagctatgtaaaaaggtttggggaacttttgaggcaggagcatgaaaaacatatatatctatacccgtggtgctagttaatttcaaaatacaataaaaaagcccaaatagactatactgtaagtgtctaaacagacaggaggtagtctaattcctaatctgacctgcactctaaaagttggacagaaaatctaacgataggggtgttttttgatgaaattaacgtatatgaaaagactttcaaatcacttgacaaacttgaaaaagccatcactaattacattttttattacaacaataaacgaatcaagacaaaactaaaaagactcagtccttgtgctaccaggactaaatcctttcaataatttcttgtccaactttttggagttagtacattaatcttctagaactctttatatagataaattttctttaatcaaaatcaatggtaacagaaacattttgtacaggtacatcgtagaagggatcttcacgacgccctaagaaatctttagattgttgcgggaaagaagcgtaacttaaaacatcttcttcacttcttgcatattcagcaatttcctgtctaagtttaggtaattgaggctcgattaaatctgctggacgaacagtaatcacttcttcatccccaatgattttttctttaatatcatcggcaatggctgcaggtggacgtccataaagtccacgaacataatccttaatttcgttaggaacaactttatagcgttcaccagagataatgttcagtagagattgtgtcccaaccatttgcgataaaggtgtaaccaacggcggataacccaaatcggctctaacacgaggaacttcggccaacacttcttcatagcgattggccaatccctgttctgttaattgactaagcaaattagacaacataccgcctggaacttgataaatcaaagttttaggctcaacatccttaaccttaggatttaaaagaccttctgcacgataatgatcacggatagtattgaagtgagctgctgctgtctcaactttctgtagatcaacacctgtttcaaaaccaagttcttctaaagcgataactatagattctgtcgctggttgactagttccgcctgcaaaggaagatacagcagtatcaataatatcagcaccagcttctgcaaccttaagataagtcatttcagagataccacttgtcgcatgagtatgtacttctagtggcaaatcaaccgcttctttgatacgctttacaaggtcacaacctgtttgaggtgttaaaacaccagccatatccttgatacaaatggagtctgctccgatttcagcatattctttagataaatgaacaaaataatcaactgtatgaacgggactagttgtataagaaatagccacttgagcatgtccgccagcttccttagtagcactaactgccgtttgtagattacgcggatcattcaaagcatcaaaaatacggacgatatcaataccattttcaactgatttttgaatgaaagagcaaacaacatcatcagcataattgcggtagcccaataaattttgaccacgcagtaacatctgcaattttgtctttttaacatgtttacgaatagtacgcaatctttcccatggatcctcgtttaaaaaacgaaggcaggaatcaaaggtcgctccaccccacatctctaaagcatgatatccagcttcatccaaagttttaagaacaggtaacatttctttagttgtcattcgtgttgcaatttgactttgctgcccgtctcttaaaaccgtctccataatatggatttttgtcatttctatcctcctttagtgattgattttgatgaattttgcgatagcttcttgcatttcaataacactgtgtttacgagaacggctacaaactttagcatcgttttggcaaatataacattgacgtctaggaaaaccgagttcctgacgactgattggctgcggtataccattaactagatgtaagacatccaaatccatcagacggccaatactaatttttgtctcaatagcaatcatcttcgttttcaattctgatacaggaaggtcagaaagacaataatattcccagccagttttttgatgaacttccctttcaaaaataatacgaccccttaaatcttctttgacaagattaataattgactgaaaagttttatttaaactttctgagcatttaattgggccagggatgttcatgctagcacacagcaaggattgaccttcaaattgtcgaagtaaagacaattgtcgaaagctacgttgttcacgagctgccatcatttcctcaagcgtaacttcttctcctttaaaaacatctgtatcagacattgcgaacaacatcaattaagctgccatcacggtattcaataagcgctacaatcttatcaccatattgaataggttgaggattaccaacaatagcgtaagctttttcttttaactcttcaatggtcaattgaggtactttcaaatctttgaaatattcaatcaaatctggacgattaggattgatagcgataccaacttctgttacgacaacatcaacacttgtacctggtgtaataacagtattaaccttatcaacaaaagtaggaatgcgtccacgaaccaatggtgagataaccagactcattttagcagcaaaagctgtatcgcagtgatcacctgatgctccgcgaataaccccatccgaacctgtcataacattaacattaaaatttgtatcaacctccaaagctgagagaacgcaaatgtctaattgattgataacagaacctttacttaatggcgaagcatacatattagcatcgatttcataatgtttttcagcattacgatccaaagatacagcagatggatggtcgaaatcttgaacatcgaggatcttatcaaccaaaccttcttccaatagttcaaccattgcattggtaataccaccgagtgcaaaattagctttgatgtcatctttaatcatttgttcacgcataaaacgtgtcacagcaagggaagcacctccagtacctgtctggaaagagaaaccttccttatagtaaggagagcttgtaatcactttagcagcatactctgcaataagtaattccttagggttcttagtataacgtgtagcgcctttggcaatgccttctggatcaccaatagcatctactactacaatataatcaacatctgtttgcgggatgctaataggtgtattaggatatggcaccaaagtatctgtaacaatgacgacctgatcagcatatttggcatcaatcatagcataaccaagtgaaccacaggttgtttttcctctagttccgttagcgttaccataggcatctgaacttggtgcccccaaaaaggcaacatcaatatgaatatcatctgttgcaatagcacgtgcacgtccaccatgagaacgaataataacaggattttccataatgccttctgaaatggcggcaccaactttatcacgcaaaccacttgaagtaatattagtaacaacaccatttttaatatgatcaatcagtggttcatgaacattggcaattgaacttggagcgatagagatatccttaatccccatcttagcgatttcatcaagcaccatattcatgacatagtccccttcacgaaaatgatgatggaaagaaatagtcataccatctttgagccctgttttttcaattgcttcatgaatagaagataaaagtttatcatcactaggttttaccggtttaacttgtcggctggattccttatagcttttaatatgtgcaagttctccttcaaatgcaccatattgattggcatattttcgaggaatatcacgtcctaatttattttctgccatttgaaatatcctccccagtaagtaatccagcggccttagctaaagcaataacacgttgagcacgctcaacaattggtttatcaaccattttaccctgaagcgaaacaacaccagaacctttgctttcagcctcatgaatggcccaaacaacttcttttgccttttgaatttctttttcatttggagcgtaaattgcattaaccaatggaatttgacgagggttgataacagatttaccatcaaatccaagttgcttaattaaacgtacttcattttgaaatccttctggattattaacatcagaataaacagtgtcaactgctgcgataccggcggcacgagcagcatgtaaaatcatattgcgagcaaagaaaagttcttgaccatcaggataacggcgcgttctcatattggtaacataatcttcagctccaagagcaatcccaattaaacgatctgatgctttagcaattgcaagcgcattcaaaactccttgggcagattcaattgctgccatcattttcgtacgcccaatttcgatgtcattgttacgctctactctttcaatggcatcttcaacttctctaatatctttagcagtttctgtttttggcaatcgaataacatcaacaccggctataataaccgcttcaatgtctaaagcgccgcaactatctaaactattgatacgaacaactgtttccaccttgctgtaatcaaatgtttttaaggcaaaatgaactaatgttctagaagcatccttttctttaagagaaacagaatcttccaaatcaaacataatggagtccgcaccatataaaggagcatctcgcagcatagctgcattggcaccgggaacaaacatcattgttcttcttaagcgttccatgagtcaatctccttccagtcatagacttctacttgtgccgcacggtgaacggctgtaatggttcgtgctttaatagtgcaatctaaagcgcctttgtcaactgcttcaacacttgctgctttaacacccaaatgtttcaatgtttcctcaatgactttacggatttgttgaccaaattgtttttcaacactgctttctaattgaaccgtaatgccttgaacatcactaggatttactgtcaccatgatatcgctagattctaacgaaccagcaacagctgtttgtttaatatccatattttttacctcatattttttggataggcggcgctggcaggaatgaatcccacaggtgtcgcgttattctaaaattaacatagttttaattattgactggaaaaattttgattaaaagttcagcaacaatatataaaatacctaaaacaataaagacaccagccatacccaagcccattaattcaaaggcttgaaggagatcattcgtattcatatcttttttatccttctttttttctgttgtattcttagctaaagaatgacagaagtaagccacctgcgataacagaagcaatctgtcctgaaacattagcacctactgcatacatcaaaacaaagttttgaggatcttcatcggttgccatcttttggataacacgactggacattggaaaagctgaaatcccagctgcaccaatcattgggttgattttttccttacgaaaaagatttacaattttagcaaaaacaacaccgccaacagagtccataatgaatgctactaaaccaaacaagataataagtaaggtttgcacattaagaaaaaggtcggcccgcatttttacagagatagttaaaccgagcaaaatactaacaatattaactaactcattttgtgctgtttgcgatagacgatccaaaacaccacattcacgtaaaagattaccaaacattaagaaaccgaccagcggcaaggaaattggagcaataaatcctgctacaatagtaataacaataggaaacagaattttcgtcattttagaaacattttctgccttataagtcatacgaatcttacgttcctttttagttgttaccaacttaatagcaaatggttgaataattggtaccaaagccatgtaagaataggcagcaactgttatgggacccaatagttttggtgctagttggttagcaacaaagattgatgttggaccatctgctgcaccgataataccaattgaagcggcttctttgatatcaaagccagccataacagctacgacgacgacaaagaaaatcccaaattgagctgctgcaccaaagagcagcataaaaggattttgaagtagagggccaaagtcaatcatggcaccgattccgataaaaattaaaagcggaaaaagttctgtattgattccgaatttgaagagaatatcaaagattccctcttgtttaacgccgttaataacctgagttaggacacctgtaccgggaaaattcactaaaagtgtaccaagtcccataggtatcaataaggttggttcatattcttttttaattcctaaatacattaaaacagccccgatgaccatcataattatttgagggatagtaatggatattattcctgaaattaaagtttccacaaactcacttccttctacttaattaagcaattgtaattaagttatcaccagcatcaaccgtctgccccgaactaacatgaatagcagaaacagtacctgccatgccagcaacaatttcattttccattttcatcgcttctagaatcatcaaaggttgattttcagaaacagtgtcaccaacattaacaagaacctttaaaatagttccaggcattggggctggcatcgtattagcagcagaggctgttgcagctggtgatggtgtctgggactgttgtttttgatctgatgctgccctcgtgttttctgttgtaggagtgatgggggtagctgctggtactgaactttcactgatttcctccatttcaactaagtattctttaccatcaatcgagattttaaatttacgcaacattaatcaacaacctcctctttatttctttttataaatacgtttaaccgttaactgacaatccattgattcgccagccgcaatactggcagcaatcaatgaaacccttaagctttcaggattgcgctgtaaaatttttttgacaacaaattgcctatttgggtgatcttcagctgcaatagctgttgcgataagactgactgtttgataatcgacttcatctgcaggaataaaagccgaaataggctcccattcagattgaaaagaatttgcaatcttttcctttttactatcgttgtttttttcaataggatcctgtaatttattgaaaaatcgcgtaaaaattcccatactcttcccctttcttataatataataataacaaataaaaagtcatctgcccaatcaaagtttctaactctattatataatggattctaagtttttttgggattttttgtgttctttttgaagaccttttcaaaatgttttttttgtgttcttcttaaagaagatcgttttatttttaagcgctttcatttatactagtcttagacaaacttaataaccttctttttagattctgtgatgttcattgggttttaattaaaaagactaataaaaaaggagagacacattatgttgctaacaattctagcttatgctatgattattgtcttcatgtacgttgttatgaagaagaaaatgtcgccttttacggcactgattatagttcctttagtagctgtcattattgttatcttaacaaattctgcaaactttacagctgataaaagtttcgttgaatttttgggaggcgataaaatttcccataatttaacagctattgggcctatggtattatatggaattaataataccgctcaaacaggaattatgcttctatttgctatcttatatttctcattaatgctggatgcagggctgttcgatccgattactgaaaaaatgattcgctttgctaagggcgatccaatgaaagttttgatagctaccgctatcgtttccgctgctgtttctcttaatggcgacggaactacaactactcttatttgctgttctgcctttctgccaatctataaaaaactcaatatgaaaattatgaatcttggtgttttgattattcttcaaaatactattatgaacctacttccttggggcggaccaactgctcgggctatgtctgttttaaacgttggttctgaaatattaggctatctagcacccggtatgattttatccctactttatgttatcttcttcgtcgctagaagcatgggtaaaaaagaacgcaaacgtttaggtgttactgaattatctgacaaagaaataacagaattaatcactgttaacgatcctgatacacttaaaattcgtcgacctcaaaatttttggtttaatggtattttgacacttatcttaattgcttggttagttgccggttctttcatttcggctattgaaatgccttcacttcttctctttgcattaggaacttgtgttgctttaatggtcaactaccctaatttgaaagaacaatcaaaacgaattagtgaaaatgctggtgatgctgttcaagttgttatccttgtcttcgctgcaggtatcttcatgggacttttccaaggttctggtatggctggggctctagcacaaagctttacaactatcattcctaaacaactggctggtttctggggcttagtcatcgcctttatctctgctcctggtacatttttcctttcaaatgatggcttttattatggtattatgccagtcttggcggaagctggtgctaaatatggatttgataatgttgctatggctttagcctcattgatgggacaagcttttcacttattgagtccattagttgcctttatttatctacttcttcgcttaacgggcttagacatgggcgaatggcaaagagagtctgctaaatatgcactggttgtcttcatcatctttgtggtgacaattcttatcgtgggacgtctaccattttatattccacaataagaaaatcacacttatcctaaagagggttagggagcaagtttatttcctagctcttttacttgtaatattagtaagagagtggggcagactagactattgctgtgtaaccatctagtctgtttcagaaaattaatccattattattttataaattaaatcatcaagaaacgagccctttcgtcattaatttaggtataatgaagttattattaaaaactaggagttaactatgaacgcatcagttataactgctgtaaaaaataatttagatttatcacaaaatgttcctttaaaagttgctttttatgaagcttttaggaagaccatcattcttagtgaaattccagcaggctgtcgcattaacgaaaaagaacttgcttctgctcttaatattagtcggacacctatccgctatgcactgggggttttagaagaagaaaaacttgttgaacatattcccaaacgcggcattgttgttcgtggcatttctttaaaagatgctattgaaatttttgatatccgaaaggctttagacacttctggcagctaccaaggcaatgtatttaatgactgataaagattttgcagatatgaaaaaaattctaactgactgtgaagattttattgaagatggtgatatcgaaactattttagataatttcaatcaatttaacgatctgatttatcgaaaaagtcaaatgttgcgcctacgagagatcgttaccgaattacagacttatttgagatattttcgagaaatatcaattgcttctgtagaacggcgtaagcgagctttgaaagaacattggattatctatcgtggtatgcgcaataaggatgtcgagcaaattactcttatcacccatgagcacttgaatgcttctcttgactttattcttcaacaaatggaaagtaagtaagaccaatgcagactaaagaaaagcttgcttctttgagctatttagcagtcaaatcactgctttatgaattgaatctaacacctaaacctggtttagtagattgtcataataacggcgctcacaatgacatggatttttatacctttcttgatagtatattatccttatctccgttttttaaaaaatatattgaagtagggtggctctatcataatgaaagtccacaatatctgtttaatcaactcagaaaacttggcatagaagctgaggctgctatgttttctgcaactgagaaagtcaatactcataaaggcattaatttttcttttgctctgcttttaggagcaaccggcagttatttggctaaacacattgaactgatccaagaaaaaagacgctttatgcctcaagatagtctgactatctgtcatttggcaggggaaatgagtatgcatttaattcaaaatgatttaagccatgtggagactaaaagaaaccttacatatggtgagaaattatttttacaatatggtcttaaaggccttagaggtgaggcatcccaaggttatccaagccttactcaaaaagcccttcctttttttagaaatgaattactgaaaaaacaggacatccaaataagccagcttaagctcttgctctatctgatgacgtttattgaagacagcaatattattcatcgagggggtattaagtcttggaaaaaagtccaacaagaagctcaaactttattagaaaaagatttacctccttatcaactaaaagaacagcttaattcttacaatcaaatattaactgatcgtcatttaagtcccggcggtgctgctgatttactttcactaacactttattttgcctttttagaacagctgatttaagccgtttcatctctgttagaatattacattttattgagcaaatgctataaatgaattgaggttatggtttattctaacaaagagttctgagatcctgcctatttaaacagtgtgaagctttctctagtaaaggatctatcactgatatctgcaatttattttaaaggagtaaaccatgtcaacttctcatcccatttcaaaaatttatttttctgataaaaaaagccttcaaaaagttgatattttattagaacaagaaggcatacgccgtgatactaacttagattatatttgtgccatgtttgatgatgacttaaatatcattgcgacaggaagttgttttggcaatactcttcgttgtttaagtgtagatcatcattatcaaggtgatggtttgcttaatgaaattgtcacgcatttaattaatattcaatttgaacgtggcaatacacatctttttctttatactaaacctgatactgcaaaattctttaaagacttgggtttttacgaaattgccagagccgataagcaaattgtttttatggaaaataaaaaagatggttttagtaattatttaaaaaatcttgaaaaacctgatagcgagttccaaactactgctgctctcgttatcaacgccaatccttttactttaggccatcagtatttggttgaaaaagccgctgctgaaaatgaactcttgcatctttttatggtcagcgacgatagtagcctcatccctttttcagttagaaaacaattgattttagctggaacagagcatctatcaaatatttgctatcatgaaacgggtccttatatcatcagcaaatcaatctttcctagctattttcaaaaagatcaggcatcagtcattgaaagtcaggcacgcattgatctagctattttcattcaaattgcaaaataccttggtatcaaagggcgttatgtcggtgaggaaccaacaagtctggtgactggtatttataatcaaatcatgcttcaagagctgcctaagaaagctattgattgcatagttgttcctcgtaagacctacaaagacggtcctattagtgcttctactgtccgcaaggcgcttaaagaaggaaatgagcaaatcttaagagagctgcttccatcaacaagtttgaattatttcctaagtcctgaagcacagccgcttattaaaaaaattcaaaaagcagataatgtcattcattattaattagaatcccctcaataaacagcaaaaagtaagtgaacggaacagaatagatgattactgtgcaattatccacaaaatagtgtaaatctaataagattacattctttagcggatgattacgcaacaatcatagctgtttgtcccagccacttaccttcttttagtaacataaacctgtgttccttgatcaatctgactttcgatattaatatctaactcaagattattaagcacctttttagccatataaagaccaagaccagtggctttttggtgttcatgaccattatatcctgtaaagccttcttcaaaaagtctgggaatatcttcctttagaattcctatgccagtatccctgataagtatttgattttccttaatcttaatggtgatctgcccaccctttttattatatttaatggcattatcaagaatttgagaaaagacaaaacttaaccattttttatcggattttatttcccaatcgccatcaattgtcaaagaaaggtccttttgcaagaagaaaacttgatttttcttaatcaaatcaatcagaatattacgaatctgacacttttcaaaacgaaaatcgctttgattttgactgaacttaaggtagttcaaaagacgagaaagatcgttttctaaccttaacaattgtctctgaacatcttctttatctaaatgccccgtttgagccattaaagatagtgctgaaataggaactttcatctgatgggaccacaatttaatcagctgctgcagctgttcttcctgcgttttatgctgtaaattaatgtcagactgttcctgcagcagttttttaagaatttctttataaacaagatcacttggtgcagttaacatagttaaattccttggttcttttacataaataaaatgatgcaaattttttaatttttggtggaaccgccagtataaaatgagactagttatcagtaaaattgttaaactgaggattaaactattgataaaatagacgagaggcagatgataaagataaaaagtcagtaaaaaagcaagactaacaatcgcataatttaaataccaaatactatattctctcaaataagatcttatcatttaattaaataccctactcctcttactgtatgaatcttatcaaaacttactgatagaacctttttacgaagacgtgtcatattgacactaagcgtgttttgatcaataaattcctctccctcccatagtcggttgagaagagcttccttagtgacaacctctcctttataatcaataagtaaggaaagaattttcgtttctgttggagtcaattggatagtctcttgtctttctaaatttgagaatacaccatctaacgttaattcaaactcttcaatttgatggccttgcttagtgaactcgttagcacggcgcaagaaagcagcgattttggcatccaaaataggtagcgagaaaggcttactcaaaaaatcatcacctcccatattcatagccattactgcattcatttcttcatcagcactggaaataaaaataatgggcatagtcatgctctttctgatttcagtagtccaataaaagccattgaaatagggcaaagtaatatccatcagaattaaatcgggtttaaattctttaacttcttgcaagatagccctaaagttatcaacgcttttaacttgatagtgttgtcccaaatgattctttaaaagattgacaatggttgtatcatcttcaaccaagtaaattttttcttgctttagcataactttattctaccaaaaaagtgacgaaaaatcgtcactttttatctttcaataattttatagtaagttctgctcgttaacttgtaaataatgaaataaataatcaagattccaactacagttagagcgctaacagtataaaggaatttatcaccttgtacaccaaacaggaagagcagctttttaagaataggcaaagcaaaaacaaaatgtacgatagccataagtaaaggcaggaagaaaactaggataatttgcgagttgattgtttttttaatttgttttaagctcatccccacttcttgtaaaattttataagatcgcttatcttgtgttccttctgaaagctgtttataatatataattaaagcagcaccaagtaagaaggcaattcccaatagaaatcctgtaaagaggaaaccgccagtcattctcaacccttcagtacgataattcgcagcagttgagtaaagaacagctatatcatcatcgccatagaggagtccatgcttagcctgactcattctatttaaaacctgtttttctttatttgttagattagcaaaagctaaaaatgtataggtataatcatattttgatgcatcatcataaggtttacgcatagcttccatagttgcatcgtcaggaacaacgagaatacccgcaggtgttgctgagttgctaatcaccatatttttaatagattttatatgataaacattcttataagtttgaccaaaccaagttaaagttttaaagggtttaacagtggtattttggctataactgtaaaaggccacttctcctgctgataattgagggactttattacctatagaccggaaatcatcttgcgttatgatttccattgtaccagcatgattgtttttatagaatgttctattagttgcaatagacttatcaataactaaattttgcttttgtgtaaaaagaacaggatagctgatatcaaggtaagctgaaaattttgccttactattatagccggctcttttgagcggtgctaagacctgcttttgaaaaatttcctcagcctgttgacggttactgatatgtttcatctcaatctgagcatttttgggataagccattttaaccatattttcactacttgtatagagcgccactgttgaaaatatagttacaaaagccataatagctagcagagtaatgttagctaaaccgacagcattttgcttcatacgaaaaatcatctgcgaagttgttacaaaatgctctggttgataaaaataagatttgttcttacgacgacgtttcaaataccaagtagtaaaactaatgtaaaagagataagttcctaaaataactgctaaaatagcctggaaaaagcgtgtaataccaaatatagcattaacattaccagaggtaacagataaataataaccataaccaatcgctaagatagcaataaaagctaaaacaatatttcctcttggctcacgttctccttgactttgattgctaaagagattaagagctgatgttttgctgatctttataatattaactagttctaaaaataagaagatgacagcaaaaagaataagattaatcacaaaagctggtagtgttaattgaaaatttagatcttcatactgaataatattgacaaaaatcaagtagaaaaaatttgagagaactgcactgagaaaggttcctaggataattgtcactaaataagcaactatcagctctaatgttgatacccaaatgatatgcttcttattcattcctaaaatattatacagaccaaactctttattacgctgtttaagaaggaaattgtaactatacaaacaaagaatagctgctaagatatcaagtactatggtagccaaacctagagcataaactcctgcccccatagacttagcggatggactagtcataaggagtaccgtaatagtactaaaaataaaagttgtcacactgactagaaaaaaaggggtgaaatgtttaaaagactgcttaatattattaagagcaagtttaagatagaacatgttactcacctcctaacagcgctgccatacttagagaaatttctttgctaaattcttgattgcttttatttcctctatagagttggtgaaatatccgtccatctttgataaaaagaacacgtttagcatgactagcagcattagctgagtgggtgaccatcagaatcgtttggtcatcattgttaatagcttcaaataaattcaataagtcttctgaattacgataatcaagtgctgctgttggttcatctgctaaaaggatttgcggattggtaatcagactgcgagcaatagcaacacgttgtttttgaccaccagaaagttcaaagggacgcttttctaataaattttgaatccgtaatttcggagcaaggcgatacaaatgtttttccatctccttatagtctttacgagcaagcactaaaggtaaaaagatattatctttgacagaaagtgtatccaacaaattaaactcttgaaagacaaagcctaagtttttaagacgaaattttgctaaattgttttctctgattttggtgatgtcttggccatttagaataactgccccatttgtcggcttttctaaagtcgctaaaatgttaagtaaagttgtcttgccagaacctgattctcccataatagcgataaattctcccttgtccactttgaagtcaacgtcttgcaaggcatgcgtctcttcttttgaaaaacgggtacgaaaaactttttctaagtgattgatttctaaaaacatagcttctcctttttatcattataacttaatttatttatactactatcttaaaataaaaaaagaaaagatatcttacacttaaagaatcgtagcttacaaaattgtaagcattgacattaatttaatagaagccaaacaatattttagtttggctctgttttttttgataacagccaaaaaagaagcctgagaaatttacagctcagacttctttttaacattagaagatgaaataatcaaaacactattcttctaagataagtattaaaatctaaagaaattgtcaaagaatccattacgagggtgtctaaaacgaatagcactactgctgccacgaccaaagtctcttctgtaatcataatcccagtggtttctttgatcatgactggcataacgataaacaccattttcatcaaagtaaacacgtcttccttcaacaatatgccaaccaattaaggcatagccatcattgccaaaatagtaccagtttcctgatgatgttttcacataacgattacgaacttcatttccggaattaggatcatagtatttgatacgacctttacgctctgtaatgagctctcccttagcctgaacaccattagacttaaaatagaggcgctgtccgttaacaactctggcaccggttacagcgacaccattgtgatcaaataagaaccattctcccttggaatttctaacaaagcgattacgaacttcatttccggaattaggatcataatatcttagatatccatttgcatctctgataaattctcctttggcttgaacaccattaggtttaaagtaaagacgttgtccattgaacgttacagtaccggttacagcgacaccattgtgatcaaataagaaccattctcccttggaatttctaacaaaacgatttgaaatttgatttcctgagtctctatcaaagtaacgcagctttccatcagcagttgtaataaactgtcctttagcttggaacccagaagcatcaaaatattgaatagcaccatgaacacgtgttaagccgacagccataataccattttggaaataacgccattgttgaccaaagagatagtaaccattttcataacgacggccatcatttccataataagacaatactttattaccattatcataaatagcatttcttaattgaataccatttgataagaaataataattagcaccgttaattgattgagcaccagtgaccatataaccgttattatcgaaataataccaattatttcctaaactaatgaaagcatttttagcttggttaccactcgttgaataataaacataacctttaccatcaaataccaatccagttacagaactgcttgttccgtgatttgggttaactaacgatttaggaaggaaggtgttgtctgaaacaagactgaagtaagtattggttgcctgatcttttaagacatagcctgctccgcgccctaaaatatttgtcccattaaagtacttggcagaccattgcttaatcttaactgaaggatccatcggaacccctgtggaaatttgttttctcgcaaaaagctccggatatttagcttgcagctcctctaagaaagctcccccatacttggcttgttgatctttaccagaactcttaccatcaactacataaagggtgtttttgatctgacttcctgcaacaggagtcccatacttatcaacacgggttgctgttaccacttctttttcagggagagcatacatttgatcaggcacccagtcagccattaccttaatgcccttgctgtgtaacgctttgatggccttaaccaaatcatcggctgtcccgtatttattaggtttggaaattcccaaatcataacggtccgtaaaagcatagccgttttggatcacagaatccaagaaagaaccatctgttgaagacacatactgcggtgccatttcaaaatctgtgacaccccattccgcaaacttatccacattcttagcaatcacaacattggtatattcctcttttttagtggcgaaagcttggaaattagagaaaccttcaaacatgacgcgtgaatcaagggccgcattttgatgcacagacttgccatctgttgatggggccgtgctagccgcaacgcgaacatcttgatcagcggcagcgcctactggaacccagacacctaaatagccagaaacttgagggttggcatagcctttaatatcagccgctgtgaagatcaattcccctctgtcattggtgtagcgcaccaaaccagccgcttcttgatcggaatgataagccttgataccgttatctgtggtcaagagtaaaggtcggtaagcttggttcttatgggctgctcccatattgacaaccacgcgatcagaagccttcaaacgtaaagaagggttattgccttcaatcacggccactcctgaaatccgtgtggtgcgatcccctgtatccgttgctttcaaagcacctttaccatagcggacagacgtaatgatttcagaattaccaacctgttgattgcgcatggcttgaccgcctgaaacatacttaatacgagctttaagcagggtttcgatggcttcgtaattgatcgtcttatgagccatgtattgcccgtcatctgtaaacatatccccataatagacacgcggcacactggatttgttggttaaaagcagggcataagaaagtgccgtattatagtgtgtgtatttcttctctgtagctaataagtctttgttgtaaatctcgaaagccttcttgatttcctccatagtgaaagaatacccgacaacattaggattgatttctgccttgatgatatcacgaatcaagtcctgcacttcactgtcatgggcacggatgaaggaataagaagggactgcggcagtttcagcattatcatcagttcgattcaccagactgttagtgatcagaggattcatgcctgaacgttgattcaaaggtttagctaatgaataaagcaaggaaagacgtaacctgttatccatgttaatcatattgtcgccatcatcatgaaggtaaggagtatcattataactccatgcctctaaaatagacaaatgatcattagcagccttatcatttttatggatccccttagcagctttgaggtaatccccagcaatttggagcaagtcagcatccacattatccaccgcatcaacacgaatggaatcaaagttagcatccggatcgttggcataaatgttaccaaagttcataagaaagtggagccagttcagctgttcggcctgaacaacaggattggaattatccacatcattagctagcaagaactcgtaaccaccgatggtgcgatcggctgtataccttggatctttctttccggtttgattggttggggtgcgatttaagatacggtagttggaattagcctgtgaagttagcttgctattgttactgtaaagcaatgcccctttttgtaagtgatcatcaaacggtttttcgctgtcactgttccaagctgactgtgtcttaacaaatgcggaaatagtctgacgcagccaattggtattcttttctgcagtgattttttcttcgatcttagtttgtattgtctgagcagctaaattcaattgaagcggactggttgctgtattgtatgtttgatgaataccaagctgtgcattcatgtagttaacatattgacgctgcgtttcttggtcaggccaccatgtcatcaataagggacggaaatctttttctgttgactgtgtccatgttttaccatccttcaagatgtacttaggacgataccaactctcagctgtcaaataatgatcaacatgttcgaagtttgcagcatctgtactatagacctgattatattgagcaaagctgttagtgttatcattattagtgatattaccctttttactaggtaaagtattatttgataatgctcctgtttcatcaaagaagaaagttttcccattaatatttaaagcataattcttttgaagagttccatcttctttataataataatatttaccgttcacttttctgatatttttgacattacctaaggctgcaatatcatcttgactaagtgatgacggctgttttaatttaccaatctttggttttattggaactattttatcagtgacagttcttgaatgtgcagtattattgttagcaggaacaaatttaccagtcgcagttaaacggtttaccgcttttgatgtagcaattattttgtcactattatcagttttagactgttccgaagttgttgttggtttaacgtcaaaattagctgtattagcagtagtatttgtagactggtttgttgtagaaacattatcagtaacagtggcggttggttgagatgttgctgaagttgctgtacttgtatcagtagcagtcagagtttcttttgctgcttcacttgtcgtcacaagactagcctgagattctgtaaccgcctgttgacggtcgtcagttgaatctgcttttactagacttcctgaaagagaggtcaaagtcactacagctgaagcaacagatactgtcacccatcttttctttactttacgtaatttaaaacgtactttcttttccatatttcctccaaaaatagttagagttagtgttttgatataaaacactagtattgtaacacttttataacaaaagcacaatgtatcgtaattaatttataatgaaattcttcattttttagaaaaataataaataatatttaaaactcctaaccctagaaacgccctcttaattaacttaagagagcgttttttcaattagttaatccgaactcgttctccagagttagcatcgtaataactgatacggccgtagcggtcagtaacaaattcacccttgacctgaacaccgtttgctctaaagtacaggtgttgaccgttaatggttctggcaccggttacggcatagccattgttatcaaaatagaaccattgaccctgagcattgcggacaaagcggttgcggatttgatccccagaattgccgtcgtaatagctgatacggccgtggcggtcagtgacaaattcacccttgacctgaacaccgtttgctctaaagtacaggtgttgaccgttaatggttctggcaccagttacggcatagccattgttatcaaagtagaaccactgaccctgagcattgcggacaaagcggttgcggatttgatccccagaattgccgtcgtaatagctgatacggccgtggcggtcagtgacaaattcacccttgacctgaacaccgtttgctctaaagtacaggtgttgaccgttaatggttctggcaccggttacggcatagccattgttatcaaagtagaaccactgaccctgagcattgcggacaaagcggttgcggatttgatcccctgaattgccgtcgtaatagctgatacggccgtggcggtcagtgacaaattcacctttgacctgaacaccgtttgctctaaagtataggtgttgaccgttaatcgtttgagatcctgtcactgctgcaccatcttcaccgagatacagccatttaccttcttcgttttcaataaaacgattacgatacatgttcccagattgcttatcaaaatatcttattttaccatcggcagttgttacaaattttcctttggcttgatagcccatttcatcaaagcattgaacctgaccatcaattacagttaatccaacactcatttcaccattattgaagtgacgccatacaccactcatgaattgataataaccattttcataacggcgaccgtcatttccataataagcgtaagttccatcttcattcttaagaatagcatctctgagctgtagaccatttgataagaaataataattaacaccgttaattgattgagcaccagtgaccatataaccgttattatcaaaataataccatttatcaccttcgctgatgaaagtatttttggcttggtaaccactcgttgaataataaacataacctttaccgtcataagagaaaccaacttgactatcttggtttaacaatgttttaggaaggaagtttatttctttattatctgaaatattaaagtaagtattggttgcctgatcttttaagacatagcctgctccgcgccctaaaatatttgtcccattaaagtacttggcagaccattgcttaatcttaacagaaggatccatcggaacccctgtggaaatttgctttctcgcaaaaagctccggatacttcgcttgcagctcctctaagaaagctcccccatacttggcttgttgatctttaccagaactcttactgtcagcaacataaagaacactcttaatttgtgagccttcaaccggttttccaaacttatcaacacgggttgctgttaccacttctttttcagggagagcatacatttgatcaggcacccagtcagccattaccttaatgcccttgctgtgtaacgctttgatggccttaaccaaatcatcggctgtcccgtatttattaggtttggaaattcccaaatcataacggtccgtaaaagcatagccgttttggatcacagaatccaagaaagaaccatctgttgaagacacatactgcggtgccatttcaaaatctgtgacaccccattccgcaaacttatccacattcttagcaatcacaacattggtatattcctcttttttagtggcgaaagcttggaaattagagaaaccttcaaacatgacgcgtgaatcaagggccgcattttgatgcacagacttgccatctgttgatggggccgtgctagccgcaacgcgaacatcttgatcagcggcagcgcctactggaacccagacacctaaatagccagaaacttgagggttggcatagcctttaatatcagccgctgtgaagatcaattcccctctgtcattggtgtagcgcaccaaaccagccgcttcttgatcggaatgataagccttgataccgttatctgtggtcaagagtaaaggtcggtaagcttggttcttatgggctgctcccatattgacaaccacgcgatcagaagccttcaaacgtaaagaagggttattgccttcaatcacggccactcctgaaatccgtgtggtgcgatcccctgtatccgttgctttcaaagcacctttaccatagcggacagacgtaatgatttcagaattaccaacctgttgattgcgcatggcttgaccgcctgaaacatacttaatacgagctttaagcagggtttcgatggcttcgtaattgatcgtcttatgagccatgtattgcccgtcatctgtaaacatatccccataatagacacgcggcacactggatttgttggttaaaagcagggcataagaaagtgccgtattatagtgtgtgtatttcttctctgtagctaataagtctttgttgtaaatctcgaaagccttcttgatttcctccatagtgaaagaatacccgacaacattaggattgatttctgccttgatgatatcacgaatcaagtcctgcacttcactgtcatgggcacggatgaaggaataagaagggactgcggcagtttcagcattatcatcagttcgattcaccagactgttagtgatcagaggattcatgcctgaacgttgatttaagggtttagctaatgaaaataatagagacaaacgcagcttattgtccatattaatcatattgtcgccatcatcatgaaggtaaggagtatcgttgtcactccatgcctctaaaatagacaaatgatcattagcagccttatcatttttatggatccccttagcagctttgaggtaatccccagcaatttggagtaagtcagcatccacattatccaccgcatcaacacgaatggaatcaaagttagcatccggatcattggcataaatgttaccaaagttcatgagaaagtggagccagttcaattgttcggcctgcacgacaggattagaattatccacatcgttagccaaaaggaattcgtaaccgccgatagtgttatcagctgtataccttggatccttctttccggtttgattggttggggtgcgatttaagatacggtagttggaattagcataaggcgttaatttcccttcattatcgtaaagcactgctccattttgtaagtgatcatcaaacggtttttcgctgtcactgttccaagctgactgtgtcttaacaaatgcggaaatagtctgacgcagccaatcagtattctttaaagttgtaattttggcctcaatttttgcttgaatagttgcagctgcaatatttaattgcaattgattacttgtatcatcataagtcttgttaatgccaagctgtgcattcatgtagttaacatattgacgctgcgtttcttggtcaggccaccatgtcatcaataagggacggaaatctgtttctgttgactgtgtccatgttttgccatccttcaagatgtacttaggacgataccaactctcagctgtcaaataatgatcaacatgctcaaagctctgtgcagagcgatcataaacttgattatattttttgtatagattacttcttgttgtgacgatatctttatttacagtgtcaattgatgtatcagtataagcgccagtttcatcaaaatgtaaaattttgccatcagcaattaatgtaaaattagtacgaactttgccgttattgtcataataataatacttaccatcaatttcttttacattgggaagtttttccaatatttgtagattggctgcattgctatcatcaataacatctgtatcagcttcggttgtttgtttactaatattattagcagcagcttcagaagttttgtcaactgtagttgtttgattttgaagcttttcaccattagaagctgtttccccaacagtataaggattacttacaacctctttgggattaactaccgaagtagagctactgcttgtcgttactgtatgattagtttgactactagcagcttcttgcttagatgtcgcttcggttgttacattagattcttcattagcagtaacaacactggtattagaatcattagaaatttgggatttcgattcattagaatctgctttaaccaagccacccgaaagtgtagttaaagtcatcacagcagatgcaacagatactgtcacccatctttttttaactttgcgcagtttataacgcactttcttgtccattaggaacctccaaattttaaactgttttattcaaaacgttataattgtaacacctttctaataataaaacaatctttttgcaacaaaaattcttttttctttaaaaataaaaaagaatattcaaattttttattttatttattatgacaacatgataaaaacaaaactatcccacaaaaaaacaacagtctaattgctgtcgttttttacattatctacagggagtacccaccacaattgtcgctgcttacagcatctggcaaagttggagattacaaactccaactttagcaatgaaacgacagagttagttacttgcgtgccgtcctcttaaaactgattagcaaaaaagccaatcaatagatgaaataggcttccaaacaaatctaatatagttattttctatctcaatatttaataaaaccaatatttttaaaaatcttatttaaacagttaaaaattgctgtagatctttaagtgatcgctcagcaatcttctcataacgtttcttcttatcacgaatacgtggtccacccaaatctttgatgataccaaaattaatattcattggttgaaaatgcttactttttgtatgtgtaatataatacggtaaagcaccaatagctgttgtttgcggaaagattactgcttcttcatctttgaaacgacgaacagcattgattccagcaacaagcccagaagctgcagattcaacataaccctctacacctgtcatttgtccagcaaagaatagatttggatttttacacgttgcaaaggtaggagcaagaagattaggggagtcaatgtaagagttgcgatgcatgacgccataacgaacgaaatgtgcttgctccagacctggaatcatggaaaagacacgtttttgttcactccacttaagatgggtctgaaaaccaacaatattgtaaaggctgccagctgcattatcttgtcgaagctgcacaacagcatagggagccttataatcaccatctcgcggccccttgtagtcttgtgggtattccagaccaactggtttcatgggcccataaagcaatgttttaatgccccgcttggccataacctcaataggcatgcaaccttcaaagtatttttccctttcaaaggagttgaacggagcttcttcagcattgatcaaagcttcataaaaacgtataaactcctccttagtcataggacaattgagataggcagcctctcccttatcgtaacgcgacttgagataaaccttatccatatcaatggaagattgatcgacaattggcgccgccgcgtcataaaaataaaacccttcaccgccgtttagtttataaatttttttagccagactgtcacttgtcagtggaccagtcgcaatcactgtaatagcatcatcaggaatttcagttacttcgtttcgaataacctgaatgagagggttattttcaagttctgccgtaacggcttgagcatagccgctacggtcaactgccatagcaccacctgcaggtacacgatgggcttcaccagttcgcatgataatagagtccaagcggcgcatctcttctttgagaagaccgacagcattcgttaaactgtcaccacgaaaagaattcgaacaaactaattccgcaaaattacttgttttatgctggggtgttcttttgactccacgcatttcataaagcttgacaggaataccgcgtttagcgatctgataagcagcttcagagccagcaagaccagccccaacaacattaatataagattgagacataaaacaatacctctttttgggacggaaaaacagctccctaaaatctttcttttttattatttgtttataatatcttaattcatcaaattctctaattaagctctttaaaatattagtaatatctcttaatgcaaaataaaaatcatcttatcttcagctgttatcgccttttttcataaatatcttgaataaactgaagcattacagacttataaagcctcttaaaattttacttttagagctttttatatgtacaataataatcctaaaatataaaagtgaccagaaatacaggttgatcctttttaaattagaaattttttaatccaaattaaaagtacaatacatcaacttcatcactttctttatttaacagctttttccttatagtcacactcctcattgctacaaacaacttgtttgccgccgccacggatttttttctcaacgagaaaatctccagattttggacaatcgcggcctataggtttattccatgaagtaaaatcacaatcaggatagcgatcacagccatagaaaatacgattacgctttgtttttcgctcaatgacttgacctttttgacaaatcggacatatcactccaatttctttagtaatagctttggtattatggcaatctggaaaattactgcaagcgtaaaatttaccatagcgacctaatttaataaccattggatgcccacaaacatcacagtcaaaaccggcaggttcatccttaatttggattttttccatctgttcctctgctttaataacctctttttcaaatggtttataaaattggtcaataaccttctgccactcctctttgccaatctcaacttcgtccagtttactttccatttcagcagtgaatttcacatcaacaatgtcggggaaaaattctataattaaagaattaacaatttcaccaagttctgtaggctcaaaacgcttagatactaaacgtacatagtaacgcttttggatcgtctcaagagtcggtgcataggttgatggacgaccaacaccattttcttccaaagtcttaataagacttgcttctgaataacgagcaggtggttgcgtgaaatgctgctcaggattagctgaaatctttttaactgtttctcccttgatcatttcaggaagtactttggtcttatcagaatcgttgtaaacagccatatagcccttgaacttaatctgactgccgttagcgataaataagacaccgttttgcgtcaaattaaccttaacagtatcaaaaactgcggcggtcatctgactagcaacaaaacgattccaaatgagagtataaagttttaattgatctttatcaagatatttagcaatggattcaggtgtatgattaacattagatggacgaatcgcttcatgggcatcttgagcaccggaggcattgcgaacatgatttccgtgtttagaatattcagcaccaaaatgttcagtaatataattagcagcatcattttgagccacagggctgattctagttgaatctgtacgcatataggtaattagaccttgctggccattagagccaagtcttattccttcataaagctgctgagcaaccatcatggtttttcgtgttctgaaattaatcttattggcggcatcttgttgcaaggaagatgtcgtataaggaagcggtgcattacgttttcgttctttcttttctactttgtcaacaagaaagtcatcattcttaatgcgagtcaatactttcttaacatcatcattgcttttcagcttagtttttttgttatcaagtccataaaaattagcttggaatttcttatttccttttttaaagaaaccatcaatactccaatactcctctggtttaaaagctttgatttcattttcgcggtcaataataagtttaagagcaacagactgtacacgaccagctgaaagacctttcttaacttttttccaaagaataggagaaatagaataaccaacaattctatccaaaacacgacgggcttgttgggcatcaacaagatccatgtcaatttgacgcggctcgacaaaggcatttttgacagcatctttagtgatttcattaaagacaacacggtttttacctttaagatctaaatccaaaatatgagctaaatgccaagaaatcgcttccccttcacgatccgggtcacttgctaaaaagatttgcttggcattcttagcttctttttttagagaattgattaagggacccttgccgcgaatattaatatattgcggctcataattattatcaaaatcaatggacatgcttgacttttttaagtcacgaatatgccctacagaagccaccactttatatgaacgtcctagatatttctcaatggttttcgccttagcaggtgactcgacaatgactaaatttttcttaggagtcgctcgctttttactcgtcttttttactgttgtcgttgttttacttgtcaatattctacacttcctataagttataaacttctagaatgatatatcatttttagagtactgtcaagaacaaacttctactatagaaaaactttatttaaaagttaaactcatttaaaatatcaaagcctgatgtaatgcattttgctccttcttgaatcaggtgatggcatccttctgactggccgtctaaaatatttcctggtacaacaaaaacatcgcgtccttcttccatagcacgttcacaagtaatcagactacccgaacgaatttttgcttctgctaccataacaccttgagataacccagcaataatgcggttccgctcaggaaaatgatacttaagaggttgactctgtgcttcatattctgataagagcaaatgattctttgcaatataatcctgcagtcttcgattttctttaggataatgaacatctagtccagtaccgatgaccgcaattgttgctccaccgcttttaagacttgctaaatgtgctgcagtatcaataccacgcgctaaaccgctaataataacaaattgcttacttaagtcttgtatgatctttttaacagcagctactcccatttgactggcgttgcgagaaccaactactgctaatttaggccgagctagcaagtctaagtctccctgataaaatagaagaacaggcggattataaatatttttaagttccaagggatattctttgtccaaaatggataaagaaggaaaacgattaaattctttgcgtaatgctttgctatcaagatttttgtaatgttccataaaaattaaaggctttttatttttggaaacaacagccatatcacgaagagacaaggatttttgtgtcctctcttcataatcaataatatttaagatattcagatttgttagaccagcttttttaagtttaaatagttgaaaattatccatttttatacctcactatctaaactattcgaaaaaactctatcaattgatagagtttcattacattatttagaaaaaattataaaagagactgtatttgaaaataacagcaaaattggcttcattatgaaaatgtccagctaacattttttctttttcgcttgtcatactatttatttccatcttctgattcattttgtttaaatttaattctaagcagagcgactcccaaaaataaaaacaatatccctaatgccaagcataaaataacaccaatgattcgtgtagtaacgtctttagtagcctctgtaaaaatgttataaattccgaccaaagtaaacagtaaacctaaaccaaaactgattagaatataataaagatctcgatgttttgtcttattcaaagattctactgctttattagcaatttttctcgataacatattaaccatagttttatctcctttttgctccattatagcatgaaagcgttcgattttttcgctaatcgaacgctttttctttattttttatcaataaatgattgaacttctttaatcattgctttggttgttctaataccacctgtattaaggtaccaatttttaccattaacttgaaggacatgattgtttttaatagcattcgtatccttaatcacatcattctgcaaaatcttatctgcagaagcatcctgaccaattgttgctcctctatctaaaacaaagagatactgagggttcttttctgaaatatactcgtaagaaactggcgagccatgggtgcttactttatctccttcattaacagctttaaatcccaattccttaaaaatccagccaaaacgtcctttaggcgattgacttaacaattcaccactgttagcgataacgaataatgctgacggattttttaaatgattcacttttgttttcaattttttaagagactgatcaagctctttattatatgctttagccttcttttccttaccgaaaattttaccaaaggttattgctttttctttaacaccagtcataagattagcatccatagatgctgaaccgtaaacaatagcagcctttggagcagcttttttcagctcttcgatgtttttagatgtcgcggaacgcccgctgataataattaagtctggttgcagttttgcaattgtttcaaagtcaggttcaaaaagtgaacctgcattttgatatttcttagctgaataaatttttttcatatctttattcaacatattaaggccatgttgagattttgggatagcaacaacatttttttctttgcctaaggcggtgatagtatccaaggctcctaagtcgtaaacgacaaccttttgagggttctttttgacagtaaccgtctcattgaccatttttggatttgattttttatcttctgatttaatggcataattattttccacttttacagttttatccgccgcaaaggctttagatgtaaaagtaaaagcaaaaataacaagtaaaaatgctgcaaataagtttttaaatggtttcattttcatctcctaatctttgattaagtaagcttcgtgaaaaagagcagctatttgcttaataatttatgtgctgtttcgcaatgtatttgctcctgagggtcaaaatagttacaaatctttcttccttgataagtttcaatttttattggcatatcgtagattttagacaagacttcttctttgaccacttcatccacatttccattggcaataatttttccttcttttaaagcaacaatattgtcagcatagcaagaagcaaagttaatatcgtgaatcacaagtataatcgttttattaaaatcttttaccaaacgccttagtatctgcataatctgaacagagtgtttcatatccagattatttaaaggttcatctagtaaaatatagtctgtatcctgagctagtatcatagcaataaaggctcgttgtaattgaccgccacttaattcatcaagaaagcgatctttgatctcctcaagttccatataagcaagcgcttgtgttattttatcttgatcgttttgggtcaatcttccttgatgatgagggaaccttccaaaagcaaccaattctgctaccctaattttaagattaatatagtttgtttgccttaaaatagccagccttttggccaaatcattattattaaatgattttaatgcttttttgtctaataggacttgtccactatctccttcaatcaaacggctcataatagataaaaatgtacttttccctgaaccatttgatccgatgatagctgtgatttttcctttttcaatattcacagttaaatcgttaagaacgggctttcgttgataatgtttgataatatttttaacagaaatcatttatctttactctctttcagtaaaatgaggataaagtaaattcctccaataaagtttaaaataacgctcagttgcgtttctaaagtcaggacatattgaacaataatttgaccaccgacaagtgctaacatgccaatcagaatgctagctggtagcaaaatactatgccgataagttggaaaaatatgataggcgagattaaccactaaaaggccaagaaaggtaattggaccgacaagtgctgtcgaaactgaaatcaaaatagatactaagataaaaaatttcatgaccagaagatcataatccaagcccaaactaatcgccacatcttttcccaacaaaagtacatccaatttcctcaaggaagtccaactaattaaaagcacaaaaacgactataataagggatacccacaataattttgtattaatggcattaaaactagcaaacaaattggtttgcaaaatcaaaaaatcattgggatcaatgagcatctgaaaaaaagatgacaaagaactaaaaagggtatttaaaactaaaccacaaagaagtacaaaataaatagaatactcctgctgtttaaataggaccttaaacaggaaaaatgcaaagcccaccataatcaataacgataagcaataatttgacaatgctgatattttaagagtctgctgacttcccaagaaaaacagcatgattgtctgaataaagacgtaaacactatctaaaccaataatacttggtgttaagatacgattgttactaatcgtttgaaaaataagcgtcgaagcaccaacacatacagccgtcagtaaaattgctaataaccgcttataacgtgaattgaccatatagattattaaaaatttattaacatctggaccgatgccataaagtaggtaaagagctgataaagtaataactagaactaagattaaccataatttttgtttgaaagttaatatcatgaacgccttcttcccttcattaaaaaataaaggaaaaagatacttcctattattcccatagtcaatccaatagaaacttcatatggaaaaataataagacgtccaaaaatatcacaaataagcacaataacagcacctaaaaaagaggttaatattaagttgttcttcatattatcgcccttgatagcagaaatcgaattaggaacaatcaaacctaaaaaaggaagactgccaacaactgttacaatgatagctgtcataaccgaaacaagaaccaagcctaaattaataataaattgataattcaaacctagatttttagaaaaatcttctcccaagccagctatagtaaactgatgagcataaaggtaaattaataccatgcaaggcagcaccaaaaataaaatctcatatcgatgagaagtcatgatggaaaaatgaccttctaaccaactgtttacagactgcaatatctgaaactgtactcctaaaaaagtactgattgcagatacaactttccccaacatcagacctactagaggaatgaaaacatcatccttaaatttaataacctttaaaagatagataaaaaacaaagaaccaaaaatgacaaagaccgatgaaataatcaactgcaatagtaaagaagatttactaaataagataatagtgacaacaacacctagctttgcccaatccattgtcccagccgttgtcggtgagacaaatttattttgcgttaattgctgcataattaaaccacaaacggctaaactagagccagcaattaaaatactaaccgttctaggaatgcgactagataataaaatgttaagttgtgaatcgtctaaagagcccagttcaaaaagcgatagactcttaacaccgataaatattgaaacgagagaaagaaagactgcagctgcacccagcactggaacagtgagtacttttttcataggcattcctctcgaaaaatgattaattaaagtaagcttaattagcttacaaaaccattttatcataaagtttaaaaagttcacgttatttttgaaatccgatagaaaactgtaatataacattgattaaatattttcataaaaagaaaagaactaaaacaaatacagcctttttagttcttttcttttaacattgacttaatcggttcaaaagttcttcgatgaataggagttacgcccaaggtttctaaaccttctaagtgttgtttagtaccataacctacattttgagcaaaaccataaccaggataaatctcgtcatatccaatcatcatcctatctcgcgttaccttagcaacaatagaggctgctgctatcgaaagcgaatgagcatctcctttgataatggaagactgaggaattgaaataccaagattcatagcatcaattaagagataatccggtcggctaactagaccttgcaaatcgtcaatagcctgcaacatagccattttagttgcttcataaatgttgacttgatcaatcatttcactagaaatacgaccaataccaatagctagggcaacttttacgacctgtttgtaaatctcttcatgcttctttttgggaatttttttagaatcattaagatgtctgattttacagtttttaggcagaataacacaagctgccacaacaggacctgctaagggacccctgccaacttcatcaatacctgcaatagcttggtagccttgcaaatacagatctttttcatagcgcagcatgttttccaaacgtacctcttcgtctaaatctgcttgaatgatttttttacgctgcctaacagctgcctgaacgcctgaacgggcatctgcctcaaactctgtccaatgtggatctaagaggtcagaaatggccgccagctgttctttaatttccttaatcgttgccatctaattctgccaatctatccaatgtataacatcccaaacgaccatcacgtacatccttgataaaaacttgataaaaacgatcataatcatcacgaaagcctaatttttgtgtcatgctcataatgatttcaggtgcttcctcttccaaatcaatacctttgtaacgttctaataaacgttctggatagtatcgcttgaaaaaatcaagaccaaaaatcgttatctcatccataggcagtagattgtctttaatagctccggtcatggccaatttgagtccaactgcttcctcttcaaatttaggccaaagaatacccggtgtatctaaaatttccaaatttttattagatttcagccactgttgtcccttagtaacaccaggtttgtttcccacaatagcaatttttttaccagccaaacgattcattaaggttgatttaccaacattgggaataccaacaatcatggttcgtaagttctccttttgaataccacgttcacggagtttgacaagcttatcggtcattaatcctttagccgcttcagtcacctttttgactgctgactgctctttagaattaacagccaacgccttaatcccctgcttctcaaaaaagttacaccattctgctgtgcaggtactatctgctaaatctactttatttaagattatcagctttggcttatcaccaataatcttagttaacataggattttgacttgacagaggtaaacgagcatctaccaaaatcgtcacaaaatccacaaatttgagattttcctgcacttgtctgcgggcttttgacatatgcccaggaaaccattgaattttagacatgaaacaacctttcaataactttattttagtcttataacttgaataattcttttctaaaattataccataagtcaaaaagcatggaataggttcttatcattttacggcaaaatatcttgctaaatcattaaaatatatagaattagagccactattctaactccatattaaatatgtactagcctagatagacattttaaaataatttatcataaccaatttttatattagggaagtaacttgtaacagcagcaaataatggctgaagttcttcatctgttttcttaccacgattgcaaataaatagactaactttcttattatccattttgactgcaacgagaaaagattgttgattgacagcaataaaagaacgtctggtcttaacaatgcgatggtaaagttgcacaacttgatgcagatctacaagagcaaatcctctatgataagttataagatgatttttataaataataattttaagcttatcatcatgataaagcgattcagagatgagagggtctaaattaccatttaattcaggataagcagcataaagctcatcataagctcgattaaccttatatctaacatagaaagcgatacctataaaaagcaagccaagcaaacctaagaggccacatacaattggtaggctagtctgatcagattttatatcatagagagaaacataagtataaaatgaaaaatatttgttcaactcaggctgtgatcgtaaaataccaatcattgcaccagaataatttcgaataacatggctggtacttctatgggtgttataatacttcactgcaatgcgtttaggatgctgtcttagtgaactgccagcttttaataatctagcaatatccttatcctcttctttagattctaaaccaacataaccattgtctttatatttcacaagccaaataactgtcttgtgaccatcaatatctgctataggtttggaataaatatcacgaatttcaagcgtcaccttgtctcccgaagaggcctttgtagactcgccgttataagaaactgcttgactattgttcttataagaaactgctagaaaaatccctacggctccaatgataaagaaaattccaaaaacaagatataaaacaaaccctttattacggttttcctttaacataaacaacctccactttttgcttatcactactttttcagtataacatacgctttttaaaagacagcctttgtcattaaatcttaaaaagaattcaataatcgttgtaaatacaaaatgagagtcacaacaaatcagtagctcaagaagaagttgatttgttgtgactctcacctaattttagatattgataaagacagccaagtcagtaccattaaaatttactaattagcaataatttaattactcagcatcgtattcttaaatgaaagaatcattgacagattttatttaacttgttcaaaatgcaagtgtacattaatatgatcatcgtaaccattgcgctcaagatcacgttgaaggcggtaagaaatataatgctcagcaattgtgatataaccggcatcaagcaaacgatgttccacttgtgattgaatcatgctaattgtgggccgttcagtctgtgcctcttctaaatcaacaacaacctttttggtaacttgtgccaaatcttgacgcaaggcatcatctaatacataaactgtttgtgctgcaccaagaatagcttgatatatcttatcaggatcaaaatcaacaacttgaccactacgtttgataacttgcataagaacctcttttctaaatgttactaacatctttcattactattattatctaaattgtcggattaattgtcaagttttttatcttaatctattactttttgactgatataagtacaatagaaaatcgatcatattataaaggcttttttaaatgattcctcaataatgaaaattctctacttcatcactatcgctgagattttcaatatcctaaataactaaaatatcatttaaattcactttcgaatagtaatagtaattatagccccattcaaaaagcacactagcaaaaaccagtgtgctgcaatcatttctcaacaatttcaataatgcgtctagcttcttcatcagtacaagcaactaatggcaagcgcaaaggccctgcatcaaaaccttgatgattaagaactgctttgacaggagctggactggcaacagagaagagcgcgtgaactttaggaagaaattgacgctgaatcccagcagcctttttaatatcactcttttcaatagcctccaccatagcaaataactcatcgccattagtatgtgaagctacactaataacgccatcagcccctaaactaagagcatgaaaagcctcgccatcttcacccgtaaagattaagaaatcatctggcttattgtcaactaaataagcaatattatcaagatttgtacactctttaacaccaataatattaggatgctgagccaaacgaagcatggtatcagtttctaatgttgtcacaacgcgtcccggaatattataaataataataggcagatcactagcatcagcaagagtcataaaatgctgatagagcccttcttgtgtcggtttgttgtaataaggaacaatagctaaaccagcagaaaaaccaccaaagtcagcaacttctttaacaaagttgacagaatcacgtgtatcatttgtccccacaccagcaattaaaggaacacgtccattaacaattttttgaacggcagcaaacaactccaattcttcatcatgagtaagagtaggactctcagcagttgttcccgctaagagcaaaccttgagtatgatgagccagtaaatgctcaataagctttggaagagcagcaaaattgattgatccgtcttctttaaatggggtgatgaaagctgtaataatgttgacgtctttaaaatcttgaattgacatgttctctccctctcactttaatacaccattattagttattttatttcagttcaaacttcaattctgatgtcgaacgaacaagaccacgttcatgaagactttcagcaatttgaactgaattccaagcagcacctttaagaagattgtctgaaacgacccacatatgaataccattttcaatatctaaatccttacgaatacggccgacaaaagtttcacgactgccaacagcattcgctgcttgtgggtaaatttgatgtttaatatcatcttcaagaacagcacctggaaatgctgcaatagctgcttttacttcttcaattggagcaacgtctttagtttcaatataaacagcctcagaatgtgaaaaaaggattggaacacgaacacaagtggccgaaacgggaagttcaggttcttccatgattttcttggtttcgttagtcatcttcatttcttcataagtataatcattatcggtgaagacatcaatctgtgccaaagcattgaaagcaattggataatgctttttatcaccacctgatggcaaaatatcagcatgaacagctttaggatccacaccatcattaacaacttctttaatttcacgaacagtttcattaatagctgattgacctgctcctgaaacagcttgataggttgaaacaataacacgacttaatccccatttttgacgaataggttccaaggctaccatcatttgaatcgttgagcagttaggacaagcaataatcccattatgagcatccatagcataagcattgacttcaggaacaaccaaaggcacatctggattttgacgaaaatgagaggtattatcaacaacgactgcaccagctttgactgcatagggagcaaattttgccgaaacagaaccgccagctgaaaaaagcgcaatatcaacaccttcaaaggaatctttcgtagttaattcaaccgtgacatcttgatctttatattgcaaaactttacctgcagaacgtgaagatgacaaaagccgtaccttatcaactggaagtgtcgattgttccaattgttgaatcatacgagttccaacggcgcctgtagcaccaacgatagcaactgtgtagcccatagtttacctctttattctaattcattctaataatagacattatactactttttatacaaaaaaaaaagtccataaactattgaattcaataaaaaagcccttgttattacaagggaaaaggcacttttgattaagtgtggcaagcaggttcacacaacttgccaagatctgctcctgcattatgatctccttagcgtatgtggtataaaccacaatcgactcatcgtatagttttagtataacacaaatcgtctgaattgccaagccatcaaaaaaattgaacatcacaagaggggggctaccaacttaacaaccaaaccaattaattttgtcgaaattttttctttttgtaaagttgatcgtgttactcgtcttgattgttttaaagtttctttaaaatcggctttaatatcaacaagacaatccgtctgatacatataagtcgcacattcaaaatgatgataaagactacgataatctaagtttattgtccctactactgcttttatatcatcagctataaaaactttagcatgtacaaatcctggcgtgaattcataaatcttgactcccgcatcaagaagagcaggaaaatagcgcttagctaaggcaaagggaaccttcttatcaggaatacctggcataataattttaacatcaacaccacgttcagcagcaaattgtaaagcatgctccatttcactatctaaaattaaataaggcgtcataatgtaaacataatcccgcgcttgattgaggatatcaatgtaaacattttcacctactttttcatggtcaagcggtgaatcactgtagggaatgacataaccattagcaacaatctcatgaaaattttgggttaaataaggtgcaaattcataatctttattggtagtagaccacatttgtaaaaacattaaagtaaaagaagcgacaccttcaccttccagcataacagcagtatctttccagtaaccaaatcgttcaatttgattgatatattcatccgcaagattaatccccccattaaaagcgaccttattatcaataactaaaattttacgatggtctcggtaattgtaataggtagacacaaatggagttatgggtgaaaaaaccttggcttttatcccaattttttccagtcttttagcatagtcaaaagaaagcgttgataattctaacatgccatcatacatcaccctaacttctactccttcttgaactttttgttctaaaatagaaagaatttcaccccacatcaatccttcagctataatgaaatattctaaaaagatgaatttttcagcttttagcaactgttttttcatctcttcaaatttagattgtccattcggaaagtacgtgactttggtgtttttgtaaacaggaaatcctccgcttctatggagatattgggctaaattataagttctagcgtgactttcttttagtttatacaaaatacgttgatcatactgaaaataaggtttaatagcttgtgttgattttttgataagcgatttcaactcacgataaccccaatcttgctttgtatagattaaaaaaagtgttcctaaaataggaaaaggcaaaataaccaaaagccaagtaataatcgaaagcgtatccatctgactattcacaagataaagaacagatcctatcattaagacaattcctaaaatttcaagatgaagtctatagtgattaaaccagagaaaggttgataacaaaagaaaaacttgaacaagaagtaaaacaacaataatcgtggcacgactaaatattcctcttaaaatacctcttttacttttcttcaataatcttttaaccgtattgttattactaatgattttgtcctcctaaaacagatatcaaaggttattataacacaaataaacagtcgttttttaaaaagcaataaaaaacgaggtaggaaaatcagcttcgattccaacctcggttttattagcataatcaatgttaacgacgtgttctatagaaatagacacctgccacagcaacaattacaagacctacagtagttaacaaaagccctgcttgttcacctgttgatggtaaaacaaatttcgctttttgcttggttacttgttttgaagttgttgttatgtttgttgttgtcggaacattcgtttgagaagcagtcgtttttgtttgtgttgttgaagctcctgttgtgctagtagctgtttctgtagtagttgaattattatttgttgtactacttgtttctgttgtcgcttcactagttgtcgtttcagaagatgacgaagttgttgtttcagtaacagttgttgtttctgcttgcctctttactctagaactagctctaccatatgcggattcaatacgagcgtagcctgtttgattggaataattaatattatttcctgaaatagcaatagtgttgctgacatctttaccagcagattgagaagaagttaaacgagtagtataagagataaagatagcgttgttactggatcctggaattgtataggtaaatcctgttgtcaatcctaaatcattagtttgataagtaacattttttgaaaaatcctcagcataaggtcgcgaagcagcttcatctaaactgtcaacatcatcaccagcaatgtactgcaagcgtgcagcaaccaaggaatcttttacgatttcttgatcttctccgacaacatcagtcaaagtcaaattatcaatagcaccttgtttgttgttaatgagaactttccagtgaatcaaaccagaattacttttatcctgataacccactttgttaacatctggacttattggcgtaatatctttgtctttaacataagagctataagcaacattattatagttaaagtttacaacaccaggaatagaaatattgttatgattcaattgtgcattaaaatttaatgtcatagccttatcattaggcagtttttcaaaaatatcagtaaaggtaactgttacttctcctgtattaggatcagttgttgctttaccagctaattgcccattggtatgcataacatcgaaagttagagcagtcgtaaattgtaattgctctggcaacttaatggttaaagtatccccagccttaatactgacttcatctgggaaagtaatagaattactgaaagaaagtggttcccaataattaacagccttagatggatcattagaaagtgctgtaccatctgattttgtgatagaagccgtatttgtataatttgtgacttggtcagcttttacaatcttcgttacccaaaaagctcccaataaaatagtaaggactgaaaccaagcttaatagtttacgtttcattttcataatagaattttctccttagttaatctgtagaatattttgaattgttatatctacatctacattttaacataaaaatactgtttttaacaagaagtcttcaattgttattattttgttattttaatatttctataatttttcgcttatctttgtatcataaaattttgttttgaaggttttatgcacaattatttcacatcaatactcaacaactacaacaagcaacaccataaatcttaaagatataaaataattgactgattaattttattttatatctttaactaattgactatacctaaataattatttataatattatataaaataattgattggagtgagtttatgccaaaaagaattcaatattcaaatcagaaatttaaaatattacaagcaaatctctcatctattcgaaatatagctaattggacagctaaagagttgggagctaaaattggtgttaccaaacaaaccattagtaatcttgaaaattctaatggacaaacaaataatttaaattccacacaatatcttgccattcgttctgtcattgatcatgaaattactattactgataaccctgttttaaaaaaaacaatggactacttattcaaccaagaacaagacaatatagattcaaacataaagttgaaatcggctaaagatataaaaatcgcacaacttggagccgcatcaaaagctgcatatacttctcagataaaaaacagtgaacagacaaatctagagagaaaaacaatggctgttttcgctttgcttcctttaactacttctattttgggttctaccacctctacttataagcccttttccttttttgatgacgttattcctccttgctaaatagatattttactgccaacaaaaaagtttagagtgaaagtgaatttcaccctaaactctctttaaatttttaatcaacatcaataatcattcatagaggctggcaccattagtttcaataacctttttataccaagcaaatgattttttcttatagcgtaccaaacttccagaaccatcatcgttgcgatcaacatagataaaaccatagcgtttactaagttctgcagttgatgcagaaacaagatctattggcccccaagttgtataaccaagtaagtctacaccatcttgcagggcttctcctacttgcatcaagtgtttttgaagataatcaatacggtaatcgtcttcaacggtcggtccatctggtccttgaacaagaacatctttggcacctagaccattttctacaataaagagtggtaattgataacgatcataaaagtcattaagaactagacgtaaaccaacaggatcaatttgccaaccccattctgaagcttgaagataaggatttgaaagacctcccaagacattacctcttcctgaattgtagtcttcaggattatgagctgctgctactgacatatagtaagagaaagaaataaaatcaacagtattttcgagcattagctccttgtcaccttcagccatttgaatgtcaatattattgtccttgaaataacgtttaatatagttagggtatttccctcgtgcatgtaagtcactaaatagataattttgattttcaaactctcgaacagctaattgatctaatggatctgcagtcattggataagcaggcatagcaagaaccatacagccaattttaaaatccggattgatttcatgaccaactttagttgcaagagcagatgccactaattcatgatgaacggcttgataaagatcttgtttgcttaattgttcgggatcggtaatgatacctcctgacataaacggcgcatgtaaaacagaattgacttcattaaaagttagccaatatttcaccttatctttataacgtgtgaatactgtgcgtgcataacgttcataaaaagcaattaactcacgatttgcccacccattatattttctagccaaatgaagaggtgtttcataatgcgataaggtaaccaatggttcaatatcatattttgccagttcatcaaaaactttatcataaaaggcaagtccggcttcgtttggttctagatcatcaccatttggaaagatacgagtccaggcaatagaaagacgaaataccttaaaacccatttcagcaaaaagagcaatatcttctttataacgattataaaaatcaataccaactaatttaaggttatcttccgttggtttttcagtaatcaatggacttgaagaaccagattgagcaactcctccttttggcgtaacatcttgaacggataagcccttaccatcttgattataagcaccttcaaactgattggcagctgttgcaccaccccataaaaaattttctggaaatgtgtatgacatcatcttttttcctttcaatatcgataatactattataaaactttttgcaggaaaaaaactgctactatcttgtgaaaaattgatactatcctttgatattaaaaaattctccctaataaaaggagaatcatatttaaagataaataaaagtcatttttgattgaggctgtataagacgccaattaagaatattgggactgggcatttcactcacaataaagctgccatcgctattaagatattctacaaaagcaagatgactagaagactctgcatcagatagataagaaggtaagcaggctatagctccaacttttgcctgattacccgttgtatagcctttctgatctgcttcttctatccatttactagcgttttcatctaaatgagaactaatttccttacctaactgagctgttctattataaatataccaaaaatcacttccatagctataaccattgccatcaaagccaaatttcacggtttgatcgtttggtaaattgtaagtcaacctagcttcttgaacgctatttaatctaacattgtaaaaaccagttaaaagaatatctctttcttccatttccccatccttaatctctttaaatgtcattttttgctgtctgctaatcattcttgcaaataactacatatttcttatgtcttatacttaaaattataatcatcattattacaaatgtcaatattatatttcttttttattacataatatttctaaaaagatacactggcttgaattaatgtgttctttttattagtctgatatgctacaataatactatcctttgatagaaagaatggaaagaatgaaagcatttttaacagatgaaaattttaagcatgagattaactttgataatgatttactaccttataaaatttatcaaacaactattgctaatggctatccagataccctttttcattggcatccagaattagaaatttcttatatttatgaaggtacagctcaatatcacattgattatgattattttaatagccaaactgacgatattattcttgtccgtcccaatggtatgcattctattcaccctatcaaaaataaaatgcaaaaagctcagacactacttttccatttagatttggttggctattctcttttggatcaaattagtcttcgttatttgcaacctttgcaaaactctacttttaaacttgtcccttgtatcaagccagacatgttaggttaccaggatatcaaaaattgtctttttgctattttcgatatttatcagcgacaaggacgccattttgaactcttactcaaggcaaaattacaagaattaatctatcttctctactttcatcaatacgtcctgcgaaagcattctgatgatatgtatcgtaaaaatgagaaaattcgtgaattgattgattatattcatcagcattatcaagaaaaattgtctattatctctttagctgatattatcggttatagcaaaactcattttatgacagtttttaaacaacatactggaacctcctgcacagattttattattcaattccgactgagtaaagcctgtgatttattagtcaattccattaaaccaattcttgaagttgcttccgaagttggctttactaacctctctaattttaatcgccaatttaaacgttattatcaaattactccaagtcaatatcgtaaacagttcaaaaagacacaaaaatagtaagatttggagaccctaggattaaatcttaattgaacatgggctacgggacacggacggctgcaacaagataaacataccctagacgcaagcgttatcgcttagttccctttcctcgaacgctctttgtatctttaacttgttttcaatcgctgcattaaactgttatgtctaatatatttgaaaagaggcaggacttttgttcctagcctctttgttgtaaataattatattactttttttgatcgttcaaccaatcaaaaacattgttataacttttcttgccttctttggcagttgccgctcctcccttacttttattgctaggtttaaatcctgacaattttgaagatttcttaattgttttaacatcttgaacacctgatacttggttattgaagaaataaacccaagaccaatgaccattatatgtggtatctttcaggtcttttccttgaacattatcataataagaaaaccatttattcttagcaccactatcaagaagagatttgtaaattggcaatgaataagtctttggattaacaaccttatctgctgccgaatggataaaccaaattggaatattctttaaggttttaactttttgactatcaaaccatattttatttgtcctaatacctgatttgcccgaaatactgttcttatcctcaatcattttataggtgccatcattatttctttcatattgataataagaataggctgttgcttgaggaactagagcagcgaaataattaggataatgtaaagccatattaatcgtcatgtaaccaccattagagcaaccagctaaatagatacgattaggatcaacatctttattattggccacatattttttgatagcatccataagcacctctgtataacgggaagttcctgctccctgaccattgctaccatcaccttcatccatccaataagttggagcttgaacagtcaaaacataagtacctttttgattaccagacttaaagtgattttgaatatcctctttggtcaaagcggttactttattcccaagaagagtaatatcaggatctgttccaccctctccttgtccatgcaaccaaataatcaatgggtttttattacctgattgtaattttttaggttcataagccgcatattgcaagtcaactttttcgtttttcttcgtcaaaggattggtataattgcctgaaaaacttcctcgattagtaaagacttctgaatctggcgatacccgcttattaatggcatcacttttagaggtcagattgttggttgatttgcctttataagatactgttaaacctttaatggaaacagggtaagtcttaacccactgattttggaaaacatctgtattataaacaaaaggggatgcgtttttactgctgtcatcaacattatatgtgacaggcatttgaattgttaggtaatcgccttctttctttgtagatttttgaccatttttatcagatagataaactttcttaatctgacgttttactcctgctgtttctactttgagatccttagtagacaccttggaaattttttgattcaatttaacaacaagtttaggtacagcagggccgaattcataacctttaataacaattttaacatcatcgatacgattacttgaatcaaaagccaatgtagaactggttgccataaaagtaagacctagaccgacagtgctccagaacagcatttttcttccttttttcattagaaaaacctccttaattaaaatacgattatttttaagatattgaaatcttaatcataacacccctccttttctattgcctttgtcgtaatcaacaaaagttttataatctaaaacaaaggaagaccagaacttttgtcctagccttatttgtttatttaacagctgtaagaaggtaatctcctgcttctacagtccgttcttgagtcgtcaagacatcttcaaattgatctgaattagtgacaataactggtgtaatgaccggaagtccagcagcctttatagcattaacatcaaattcaagtaaagtttggccagcttcaacatgatcaccaacttcaacaaaagatttgaaacctttacctgcaagagagacagtatccataccaatatgaatgagaatttctgcaccattttcagtccttaagccaacagcatgtttagttggaaagacaagcgttacttcacctttagtcggtgcaacaacaataccatcatctggatcaatagcaattcctttacccatagcacctgaagcaaaaacttcatcaggaacattttccaatttaactactttaccaatgagtgggctagaaatgatttcttgtttaatttctttgagttcttttacaggttcttccttatcatcaacatcactatctgtacttgttggttcaccataaagataaggaattttaataaattgtgttaaaacaaaaccaagaacaaagttcatagcaatagcgattaagaaatgaattaagatcattgaatttttaggatcaatgaaagaaggaatagcaaagagccccatacctcccataacctgcatttttacattaaaaagagcaagataagcacctgaaatagctccagaaacgcaggtcatgataaacggtacacgcattggaagtgtaataccataaatagctggttctgttacaccgaaaagggcagaaataaaggctggaatagataattgtctaaccttattttcattggtacgcatcataatattaagcagtgatccagcttgagcaaaacaaatggcgatagtcgctacaagaatgacaccaggtcctttttgtagttccaaaatagcaagcggaacaagtccccagtgaagtccaaacataacaagcacttgccacatagcaccaagaacgatgccgtaaataactggattaaagccataaatacctgtaaagatagcacctacaagatcagatgcccaactcatcacaggaccaataactaagaaggaaagtggaacagttattaaaattgtaaagaagggaacaacgaataccttaaccacatctggaataatctttttaaagaaagtttctattttggaaccagcccaaatcgctacaacgattggtaagacagtctgcaaataactagaggctgggaaaataattggtattccaaagaatgttgaataaataggagattcaattaaggttccttggaacaaagtataaagtgggtgttttactgtaaaactagctgcaatattgggataaaccagagcaaaaccaatagctaaggctgtaaattgctccattttaaaacgcttagctgctgtaagtgcaagaatcaaaggcaagaattggaaaaagccatcacctgctgcattgagaacaacataagcaccatctgttttcgaaacccctactgctgctaaaatagcaactagacctttaatcatacctgctgctgaaagagctcccagcattggttggaacagtcctgaaacgagagcaatgaaacgatcaaaaagatttccctttggaatatctccttcatccacatcaataccgccttctccagtaatgccgcttacttttaggacagtatcatagacatcaggaacatgatttccaataacaacttgatattgtccacctgctttgacaacagtcacaataccttcacgttgtttgaggtaatcatcatcagccttgctttcatctttgagagtaaaacgcaagcgagtaacacagtgaacaagcttaacgatattatctttgccaccaacatgggagacaatatcttgcgctaattcggtataatctttagccattttaggctcctttcttttttctgatcttctacaatcttatcctatgaggcattaaaatagaaaaaacctaaacaaataccaaataaatacaacaaaacactcgtttgcaatctatttcgtattcatctaggttttgcctgcatgaccagtaacaatccttacaaagatattatagcagattatttaacttttgcaagcgcttttttataaaaaattaaaagggtaatcaaaagtctcgactattatttaaaaatccaacctaatgtaagtttaggttgaccatcatttttaaaattcagcctaatgtaaacttacatttagaagacaaaatttttcatgatttaggcaaaagaaaaaagacaaacctcaagtaagtttgtcttcaatctgaaactaatctttattgactagtctctagacgttgaatatggatggtcaggtaaacctgctcatctctactcatagcaaaattataagcagattctacataagatttaattttttctgtgcaagcaaaggcatgaggataattttctttgacctgttcataaagaaaagcgtcattttttccttgaacaagaccattagctacacgttgagcaaagtattgaacatgggtgataaaccgattataactgattgattcttcatctctaacctccccaaaatgcaaacgaacaatttctaaaatatcactaacaattttagaaataaggcgattcttttctaataggccaccatctttttgcgcattaataaaatgcaaggcaatagaagccgcttcatcatctgccaattgaagcgtcattttttctttgaccaattcaatcgtatcttttcctaattggaactcctcaggataaaactttctgacttcccaagcaagaggattttgtaaggtaagaccttctctggttctttggatagtataatgaaggtggtcagccaaggcaatataaagggaaatatcaaaggtttgtcctaacttttcttgcccttgatgaataatttcaagaaccagatcaatttcttcgctatcaagatcaacataaacacgcgataactctccgaccatgtctgtatccgtattttgtaaaataaatcgtttttcgattaaatcttgattgacctcatcaccgggctttttttgaaaacctagccccttccccataacaataatctcttcgttgttgataccaagtatctgaacgacattgttattaaacactttttcaattttcatagaactttccttagtaaaacaaatgacgtacttttttctatcctattaaataaaaaactaaaaaatatcttagaaaactttatttacgatacattttaaattgcaaatagagatcattataaatacctagccacttcttgccaagattatcatagacttctaaatgacctattgtttccttacttggataaaaagatttattattttttatatcagccggtagtaaatctttcgccttagcatttggcgttgcgtagccaatatattcagcattttgagccgcgttttctggctttagcataaaattaatgaaagtataggcagactttttgtgtttgactgttttaggaataactagattatcaaaccaaagattggaaccttcgctaggaacgaggtaacgaagatctttattggtatccagcatttctctagcttctcctgaaaatgtcacaccaagagcagcatctcctcgaatgagataacccttcatctcatcaccaacgatagctttaatattgggtgtcaactgattgagcttcctttcagctcgctccaactctgccctatttttagtattgaggctataagtaagactattgagactaaaaccaagtacctcacgtgcaccatcaacaagcataatcttattggtatatgctttattccaaaggtcattccaatgctgaggtactttagttagcattttgctattgtaaacgatacctactgttccccaaaaataaggaatagaataggtgttgtctttatcaaaactcttaccaagaaattgctgatcaagattagttaaacccttaatttttgatttatcaagcttaaccaaaagatgctctgccttcattttgctaatcatgtaatcgctaggaacagcaatatcataagttgttccaccttgcttgattttggtatacatagcttcattggaatcaaaagtttcatattgaacctgaatgcctgtttctttggtaaattttgtcagaagttcgggatcaatataattcccccagttataaataaccagcttatcagaagctcctttcccttctatctgttgattcatatagaagtttaagccaatcaaaagcaggataataaggaaaatacttcctataaaggaataaagtttatgcatatttttcctccctatcctgcgaaataaaataataaccaatgacaagcagaatgctaaataagaaaacaaccgttgacaaggcattgatttctaaagaaattcccttacgagcacgggaataaatttcaactgaaagcgtcgaaaagccatttccagtaacaaaaaaagttactgcaaaatcatctaaagaataagtaaaagccataaaatacccagcaataatgctaggtgttaaataaggcaacatcacttcttttaacatttgaaagtagctggctcctaagtcataagccgcatgaaccatatcatcattcatttcttttaatctgggaagaaccattagaacgacaataggaatggaaaaggcgatgtgactaagaagaacggaaaacatgcccaatttaaagccaataaaggtaaagagaatcaagaaagaggccccaatcatcacatcaggtgctaccataaggacattattaatggacaaaattgtattttgatgcttcttttttacttggtaaattaaaatcgctccaaaagtcccaataactgttgccaataaggagcttagaaatgctagcagaaaggtttcgacaagaatcaacattaaccgctgatcgttaaacatagttgtataatgttctaaagtcaaaccagtaaaacgattcatatctcctgcttgattaaaggaataaaaaatcaaataaaagataggaatataaagaattaaaaatacaagcgttaaatataaatgccctattttcttcatttctttctctccttagttacccacataataacaagcatggtaacaatcaaaatgacaccaatagttgaacccattccccaattttgtgttgtcagaaagtgctgttcaatagcagtccctaaagtaatgacgcgattaccaccaattagacgtgtcagcataaaaagactgagactagggatgaaaacagattgaacaccacttctaacaccatttaaagacaaggggaaaatgaccttggtgaaggtctgccaatcagttgcccctaaatcacgactagcattgataagattggaatcaatatcatcaagagcattaaaaataggcaaaatcataaaggggatttcaatataagaagccacgaaaataaaagaaaaatcagtaaaaagaatttgcttaggtgccaatcccataaactgtaaaaaactattaacaccgccatgataaccaaaaatccccataaaagcataagctttaagtaaaaggttaatccaagtgggcaagataactaacattaaccacaattgtttgtgcttaagatttgtcaagataagtgccgttggataagaaataagaagtgtcaccagcgtaataatagcagcatataaaatagaattaagactcattttcaaataagtccagttggcaaaaaaagtttgataattgcttaaagtgacatgtccctcaatatcaaaaaaagatttgtaaagaataagtgctaccggcgctaacacaaaaagacctatccaaagaagataaggcaggaaaaagaaattaactttcctcttcatgacgctcctcctctatggcatttattagaccttcttcatgttcttctgtttccacatattcttcaatacgggcatcaaattctgcttcagtttcattgagccgcatgatatgaatatcttcaggtgtaaagtcaagtccgataatctcaccttcaatagctttatgcgttgaatgaatcatccattcattgccaagttcatcatgagcaataatttcataatgaacaccacgaaaaagctgtgtttcaactttgacctgaagcttgccttcttctggcaacgtaatctgcaaatcttccggtcgaataaccacttcaacagcttcattaggccgcataccaccatcaacagcttcgaaacgcttaccattgaactcaaccaagtaatcctcaatcataacagctggcagaatattagattctccaataaaagtagcaacaaaatggttgattggttcatcataaatatcaacaggtgttcctgattgaacaatttccccatcattcatgacaaaaatccaatcagacatggctagcgcttcttcttgatcgtgcgttacaaagacaaatgtaatccctaaacgctgctgcagatctcgcaattcatactgcatttctgttcgcaatttcaaatccaaagctgacagaggctcatccagtaaaacaaccttaggctgattgataatggcacgagcaatggcaacacgctgtctctgaccgcctgataattttccaatcgaacgcttttcaaaaccagccaaacgcaccatgtttaaggcttccgtgacacgtttttcaatttctttcttagctacttttcgtaattttagcggaaaggcaacattttcaaaaactgtcatatgaggaaagagagcataagactgaaagaccgtgtgtacatcacgtttattgatagggatatcattgattcgttttccatcaagaaaaataccaccgctgcttgcttccagtaaacccgcgattagatttagaatggttgatttccctgaaccggacgctccaagaagcgtgtaaaacttcccttcttctaattcaaagttaatattttttaaaacaacagtaccattgtcttcaaaaacctttgacacatttttaaatgcaatgattggcttagtcaatacctatgagtcctccatttgtacttctttttcaccaataattcgaacctctggttcaagagtaacaccagaattttctttaactctatgaataacatcagcaattagatcttcgtaatttttagctgaaccgttggcgacattgaccataaaaccggcatgttttgtgctgacttcaacaccaccaatgcgatgtcccatcaattgagcttccataatcaactgacctgcaaaatgtcctaagggacgcttgaagactgaaccacaagaaggatgctctaaaggttgtttaagtgctcgtaaatgatttaaacgctgcatttcctgactgataatagtataatcccctggttttaaagaaaacttggctgaaacaacaacttcctgattatcttgtaaaacagaatgacgataaccaaagcgcatatctcgcgcttcaattgttttaatctcaccatctctagttaaaacctgagctgagatcaaaatatgagagatttcaccaccgtaagcaccagcattcataaaaacagcaccaccaatacttcccggaatgccacaagcaaattcaaagccagtcaagctatgatattgagcaactttagttgtttcaattagattagaacctgcttctgcttcaattacataaccatcaacagtcacagcattaagtttgtcaaacatgatgacaaagccacgaatcccaccatcacgcacaatcaaattactggcatttcctaaaaccatccaaggtaggttattttgattagcaaatttaacaatgcgagcgagttcataacgattacgtggaaaggctaaaaaatcagctggaccgcccacttttgtataggtatatttttttaggggttcattaatacggatatcaacgccttctaaacttttgttcatttcatttaacatcattagctatttctctactttttcatattaaaaaatcggtaaattaaaccgattttattatatcaaattttacctactttgacgacaagagaagttattttcccattaattcataatttcccaaactgatagatttcctaccagattttaactcctgatttgtccactttttccagcaaaacagctaccgtttcctttaaaaccggatgaactaattcactggcaatatcattaagaggaaccaaaacaaaagcacgattctgcaaatagggatgggggattttgaggttatcctctttaataatagtatttccataaaataagatatcaatatcaattgttctgggaccccaatgttcatgacggacacgatttaaatgtttttcaattttttgacaagcctctagtaaatcgtatggtgataagtcagtttcgagttgacaaacaatatttaaaaaatcagcttgatctgtctttccccaggccgctgtttcatagataggggacactgcctgtaaagtaatatgagagagatgagccagttcctctaaagctctctgcaaataagtctgccgttctcctatgttactgcctagacttaaataaacaagtgtcatgagcgctctcgtttcaattcaataccaaccctatcataatgaccagcaatgggcggattttctttagtaatacaaattttgatagcccttactggtgaaaattgttcaaaaatatcttcacaaatgacccctgccaatctttcgatcagagtatattgactgttttcaatacgactcttaagtactgaaaaaacttgaccgtaattcaccgtgtcttccaatttatctgtttttgaagctgcctttaaatcaagtgagagttctaagtcaaccgtaaaaatctgccccaaggtcttttcttcagaaaaaacaccatgataagcataaaaacgacaaccctttaaaataatcttatccataacaccctcatgctaactggctgctgacctttacaatgtctttgttggcagccacgttatgtactctaacaattttgcagcccttactaatggcatagccagaaagagccgctgtcgccatgtctcgctcttgcggcttggtatgaccgcctaacaaactatcaacaacacgttttctagaaataccaaataaaacaggataaccaagcttagtcacctccgctaagcctcgtagaagttccatgttttgttcgacatttttagcgaaaccaaaaccaggatcaagccaaatattttcttttttaactcctgttttttgggctaaatcagcacgttccagcaagaattggcaaacatcttctgtcacattgccataaacttcttcacactgattgtgcatcaaaataataggcgctccagtttcagctgctaattgaaacatttgcccatcataaagaccagaccacacatcatttaagatgtgcgctcccgcagcaagggctactcgagcagtctcagtcttataggtatcaatgctaatcaggcagttaaacttttcgctaatagcttcaacaattggaacaatccgtttaatttcatcctcagcagaaacaaatgctgcgccgggacgtgtggattctccgccgatatcaatgatagccgctcctgctgccaacatggcttcaacctgttttagagcctgatcgattgtttcgtattgtccgccatctgaaaatgaatctggggttacattgagaatccccataatagctgctttaccagctacatcatatttaccaattttcatgcttgctccctagttatgatgtatcattgctataatttcctgacgcgtttctttatcagattggcaaatacctctaacaactctggttacagttttgctgccaggctttttgattcctctcatagtcatgcacatgtgctctgcttcaatcataacaagaacacctttaggctttaaggcttcctcaagagcattagctatttgaactgtcagtcgctcctgcagctgcgggcgtttgctgaccacctcaacagcacgagctaatttactaagtcctgtgacgcagccatcactcggaatataggcaacatgtgctaagccgtgaaaagggactaaatgatgctcacacatagaataaaatgggatatccttgactaaaacaacgtcttcatgttcttcagaaaaaacagctgtaaactggtctttaggatcctcattaagacctgcaaacatttcctgatacatcttagcaacacgctttggcgtatccaacagtccctcacgattagggtcttcaccaagtgcttctaacaactgataaacggcttcttcaatctttttttggtctgacattattttctcattcatttttcttaatacaatctattatagcctatttcttcatttttcaaaagaacttttctgacttgtgaaataaaatagagcgatcctgtaatgacataaaagtcatctctttgagccttgcttaatcttttgagccaaagcttaaagttactgacttgtttgtaaatctgtggataatctttcaaaggaagggcatcaggataagaaaaggttgtcacagtcaaatcagtgaattgatttaattgctttaacatgctgtcaattggtttggtattaatggctgcaaaaagaatatgaatctttttatcagcatactgctcttttaaaagttccactaaggcggcaacactttcattattatgagcaccatcaatcataagattgtctttgataaactctgtccttcctatccagtagttatgaaccagacttttttgaataacagtatcagttaccttaggaaaatgctcttgcaataaaagggtagccataatagccaaagcagcattagctctttgatggtttccttgcatggccaatctaatatcagaaatctttttatcaccgcaaataaaatcaaacctctcacccttatctacaagataaaaagtttgccctaactcataaatagggctctgagtttctttggccttttggtaaaaaacagctttaacatcaggacgtttttcagcaaaaataaaagggactccttcttttaaaacaccgaccttttgctgagcaatatcagaataagtctctcccaaaacagcctgatggtccagtccaatggaggtacaaataacggcttgcgccttaaaaacattggttgagtcgtagagtccgcccattcctgcctcaataataaccaaatcaaccggatgcactttcccgaaataaagaaacattaaaagcgtgataatttcaaattctgtcgctgcttccaaatcagtctcaagaggcagacgttcaaccacaggtttggctaattgaactaaatgaacaagatccctttcactgatcattcgaccattaattgagattcgctctctaaaatcaataatataaggtgaaataaaagtcccaacccgataacctgcttcactaaaaatagtttgtaaatcattaacagtggatcctttaccattagtaccgacaacatggatgccgcaaatatgccgttggggattgcccaatttttctagcatccaagtcatacgttccaagcccggtttaatcccaaactttaaactatcctgtatccaagtcaatgcttcttgataattcattttttctccagctctaaatttcaaaaacacagatgagtttaagacaaagccatcatgaccgatacaatcaccacaagcggatatatcttttagaagattatctataaaatattcaaagtatattgctaacgcagtagttatcattcatcatttaagtaaagattcttatttaatttttctcgacccttacacccttagcatcaatacgaagcaaatgagtactaccacttagctctaaagcatcaatgtccgccttgatttgatcagccttatcttgatccgttaagacaataaccgtcggccctgcaccagaaaggtagctggcataagcaccgtttcgcttaccgatctccttaatttgtgcaaattcccttaccaaggattgacgaaaacgttcatgaaagcggtcattcataatagcttcacccgctgtctttaaatcaccagtcaaaagaccggcaatagcaacattagcaattgagctagcagccaccgcttccttatatgttaaatctgttggtaaaacatcacggctgtcactggtctttaactcataattagggataaaagcaataaaagagcttttgggaaaatcagcaacaacataattaactttttgattgatataactggaaatcacgaggtttccaaataaagccggtgccacattgtctggatgtccttcaatttccgttgcaatgtctaacttttcactgtctgtcaaattcagatctgctaattgattagccaattcaatacctgcaacaataacagagcttgacgatcctaatcctcttgccagaggaatgtcactaaccatacgtaagcgatgaggtctgagatctggtgccacttttaaagctgttacaagcaacaaattatgctcatcacttggaatatcacccaaatcatgactaatatgccaagaagcagcttcttctaaaacttcaatagaaagatatttggaaagagcaacaccgacagagtcaaagccgggtccaatattagctgatgttgcaggtactgtaattttcatcttattcccctaatactttgaaagtgttgagcaatttaaagtctgccacagcttgtaatttctcagtgacatttactaactggctcttactcaatgaatgcgtaattatcaccacacgcgcttgttcaccattagctttttgctgtaaaacttgttcaaaagagatatcttctgaattgaaaatttccgccaagcgcagcattttacctttttcatctgctgtattaatagcaaaataataatgacttttaacatcatcaggatgcgcaatttttgtttcacggataaattcattgaagcatttaccgacattaccgtctttgatgcgacgagcgatgcgaatcacatcagctacaacagaggttgctgttggcttttgaccggcacccggtccatagtacatagactcaccaataccaattgattccacaaagactgcattcatcacatcattaacactggcaagcggatgagattttggaaggaatgtaggtgacacttctgcaaaaataccagaaggtgtttcctcaactgaaccaaccagcttgataacataacctagttgctgtgccatagcgacatcatcaggagtaatgcttgaaataccttgatgcactacttgatcaaaatcaattgtcatgccaaaaccaaattggctgagaataacagccttataagctgcatcaattccttcaacatcattggtcggatcgctttcagcataacctaattcctgagcttttttgagagccgcttcataggtccagccttcatcgaccattttggtcatcataaaattagaggttccgtttaatactccaagaatacgagtgaccttatcagaagtcaatgaattggctaaagtgcgtaaaatcggaataccaccagcaacagcagcctcataataaaaagctacacctttatcttgagcaagtctgatgagttctttaccatgcgttgcaattaagtctttattagctgaaacaacatgcttaccagcttcaagcgccttggtgataaaagtcttagctggttcaatgcgtcccatcaattccacaacaatagcaatatcgtcatcggacaaaatatcatcaacattcgttacaaagttaaaatcattgcccgctgccaaaagacgttttttctcatcgtcgtctttaaccaaaactttagcaatttcaagtttagtccctgaagcagctgtaattttatccttgttttccttcaataaaaacggcattccgctcgctactgtaccaaacccaagcaaaccaatttttatagacatttccttctccttgtaaacacaatttttttcattatatcaaatttttggcagaatttacagctaattatccgcttcttgtgctataataagctaagaggatattttatgactaagaaaaaacatcaaaagaaatcattaacaggtcttaatgccattttaatttttgcctgtgctttaatattaggttttctcctttttgtagtaacctaccaaaaaaagacagcaactaaaagtagaactacaactactactgtaaccagcattactaaaagcagccatcaaaaaaaagaaaaaacaaacagcaaatgggccaaacaagatcagccagttaaaatccctattttaatgtatcacgctatccataacatggctccagaggaagcaggaaatgccaatctcattgttgctcccgatatttttgaaagtcatattaaacgtttgagcgacgagggttactactttttaactccagaagaagcttacaaagctcttactcaaaacagtctgcctgctaaaaaagtgatttggctgacttttgatgacagtcttattgacttttataatattgccttccctatcttaaaaaaatataaagccaaggccaccaataatgttattaccagtttcactcaggagggaagagctggaaacctaacgttaaagcaaatgaaagaaatgaaaaaggaaggaatgtctttccaatctcatactctgacccatcctgatttatctgcttcagatcaagaaacgcaggctgcagagctaaagcaatctaaggattatctcgataaagaattagatcaaaccacaacagcaatagcttatccagcgggacgttacaatgatacaacgcttaatttagctaatcaatataagttgggagtgacaactaacgaaggcctagctagtgctaacgatggacttctctccttaaatcgtatccgcatcctaccagatacaagtgcagatgttttaataaatactatctctcctgccattcagtaacgacaaaagactaggattaaaaacagtcctagtcttttgatatatattatccttgtctttcgtccttagtaataaaaataaggtatagcttatattagatttgtttggaaatctattttcatctacttgattggctttttgttagttattcttaggggatggcacgcaagcaaccgcctccgtcatttcattgctaaattgaagcttgtaatcttcaatttagtcagtatcgttacctttggaaacgacactgtgaccacagcggcaactggtgggtattcccatcgtctttattttttagacgatgggtctctaggacaacaaagtcaccctaaatgattgcttttcactgtagtgaaagtgataaaactgcttatagttgatcacaaggagttagcaagacccaggatcgccaaaaagagtgacagtccttagatttctaaataatccgctggattatttagttttcgcctccattagttaaggaaagccataaaaaataattagcttccaaacatatttcttccaaacatatttattgaaagaataaataagtccatatcaaaagaggacaagcaagagttcaaggggctaaacagtttccaaaatatgtcgaagctgaactgcacttggggaaactatcggcagaaaagccccttcattccaacggcgaataaaacttgatgttgaatgtttaaaatacccgcgaccgccgcttgcctgcaattccagcagcaaactattggctacaatatctacgatatcaatgcgtaactgaaaaagctgccgcggatttctaatgaagtaggtacgatcacctagaccttcaaacaagtcactcttaatggtattgagatctttcaaaacattatcatattctgttctcagaactgaacgattgctgttaagattttgcgcaacttcttttaaggaacgctccgctaaaccaaaagcaagaccaaattggtagcctagaaattccggacgcgtctgagccaagaagtcttcagcatcatctgataaaatccagttattatccaaaggaacgcgattaaatgtgagagctgctgtgttagaaccctgcaaagaaacaaattctaaatcatcagagcgtgataggtgtgctgctgttgatggcactgtcaaaattaaaggttttttattttcgtcttcaaaagaagccgcaaaaatagtaacgaaattatcagaacgcaaattagtcacccaaggtaatctgcctttaaggtaatactgtccctcttgctcaatgatagtaacattcaattcttcaattttagataagaattttgtcgcatttgacagagctgtcccggctgctaatttccctgttaacaaatcaggcagccaagtctttctagcatagtcgttactgcttgcaagaatattttcgataaaggttcgatgtccccatgagataaaggaagccgttaaagaatgctgcgctaattctgacaaaaatccaataacctctgtttgagaaccacccttacccccagatttctctggaacagcaagaccaaagacaccttccgctgctactttttctaatagttggtcagctgctccgccagacttttggtcaatctgatcagcatgagtatctaaccaatcaataaattctcccgaaaaataagccataatagcccccttttcattttctatttcacatactgctgtaactctgggttaattggtgtgtctgccatattattggcataattgcaaagcgaggctaaactaacacccaaaaccacatcaagcgcattctcaggcgtataaccaacttccaagaaatcagcaaaagcttcatctccgacacgtcccttggtgttaataacagcaatagtaaattttgccaaggtatccaacttaggatcatcatcgatcggagttgcattgcgcaaggcctctaataaatctggtgccatttgaatttgcttaatcgaaaaggctgtatgacctgctacacaaaaagcacagccattggttacagcagctgtaatctgaacaacttcgcgctccgttggtgttaatgaattacgacgattaatttctcccactgtccgataagtctcaagagccgttggggcattagccaaaaggccaataagattaggtatatagccgccattgtcctttttaactgtccgcaacgtttctttaactctctcgggtgcagtttcaattgtatgtatagtaaatttagacataataaactccttttttagtatttctactatcttatcatgtcctacctttttaagataatctatattttttatggttaggcataagaaaaatttatagagctcttggataaacaaaaaattccaatttcagagaaggtacaattgaaacgccaaaatatttttacataattttatttatgcaaaaaaataactataaccaaagaaaaagcccactaagaaaaccttagcggactttattgtttgaatagctttaaaacaagactctcttatttaagagtaacagttgctccagcttcttcaagtttagctttaagttcttcagcttctgctgctgcaacaccttctttaagtacagatggtgcgttatcaacaagacctttagcttctttaagaccttcgcctgtgatttcacgaacaactttgataacagcaactttcttgtcaccaccagcagtcaattcgatatcaaatgaatctttagcagctgcttcttctccaccagctgcaccagccgcagctacaggagcagctgcagttacaccaaattcttcttcaatcgcttttacaagatcgttaagctcaaggattgaagcttctttaatttcagcaataatgttttcaatgttcaatgccattgttaaattcctccaaaaatagtttttcttaaataatttgtagcactatgctactgtttgaagacttaagcggcgtcttcgtctttgctttctgcaacagctttgacagcatatgcaacgttgcggactggcgcttgaagtacagacaagagcatagaaagaagtccttctctgtttggaagtgctgcgagagcttgaatttcttcttttgtagaaacagcaccttcgattgcaccgcctttgatttcaagtgcttcagcatctttagcaaaatcgttaataattttagctggtgccacaacatcttcacttgaaaatgcaacagctgatggtccagtaaagatatcatcaaatccttcaagaccagctttttcagcagcacgacgtaagattgaattcttgataactttgaattcaacagcactttcacgcaagttacgacgaagaacagtatcttgttcaacagtaagaccacgtgaatcaacaacgacgatacttacagctgctttcattttctcagcaacagcatcaactaattctgcttttttagcaatacttgcttcactcatcagtgtttaacctccgtttttatttttggctgaatgcaataaaaaatcgcacccaaacccagacacgaaagtacaatacgttttttcagtttacgttttgtgcctcggcaggaatattatgagcacgctcccctgctgtcttaggtcagtttttcaaaacctttactatcataacatattatttgaacaagtcaagttattaaggcaatttaagaagaattttaaattatttttattatataatacattctgcttgatatataataatattggtgttataatataggcaaatagttgataaagcttctatatcagtgtctgaaaattgttttctttactaaactgttatagtataatcgactatttataataattaaaaaagaggtaataaattatggcaaattttaatggacgcgatccttttggaaatatggacgatatttttaatcaattaatgggtaatatggggggatacaactctgaaaaccgtcgatatttaattaacggtcgtgaagtaagtcccgaagaattcgcacaatacagacaaacaggtaagcttcctggcaatccagaaatacagcaagctcaagctgctgctagaactccaaaagaagacagtattttgactaagcttggtaacaatttaaccgaagaagccagacaaggtaaccttgatcctgttattggacggaataaagaaattcaagaaactgctgagatcttagctcggcggactaaaaacaatcctgttctggtcggtgatgccggtgttggtaaaacagctgtcgttgaaggcttagcacaggctattgttaacggtgatgtccctgccagtattaaaaataaggaagttatttctattgatatttcaggattagaagctggtacacaataccgtggtgctttcgaagaaaatattcaaaacttggttaaagaagtcaaagaagctggcaatatcatcctcttctttgatgaaattcatcaaattttaggtgctggttcaactggtggtgacagtggttctaaaggtttggcagacattatcaaacctgctttatctcgcggtgaattgactgttatcggtgctactacgcaagatgaataccgcaataccattatgaaaaacgctgcattggcacgtcgtttcaacgaagtcaaagtaaatgcaccttctgctgaggatacttacgaaattttaaaaggtatttcagctctctacgaacaacatcataatgttattttgcctaaggaagttttaaaagctgctgttgacttatccgtacaatacatcccgcaacgcagtctgcctgataaggccattgaccttgttgatatgacagctgctcatctggctgctcaacatccagcaactgatgttaagacacttgaaaaagaaattcaaactgaaaaagataaacaacaagctgctgctgaaaaagaagattatgaggaagctcttaaatcaaaaactaaaattgataaactgcaagcacaaattgacaatcatactgaagggcaaaaggtcactgctactatcaacgatgtggctgaggcagttgaacgtttgacaggtatccctgtttcgcaaatgggaagcagtgacattgaacgtctaaaagaaatgaattctcgtctcaaaggcaaagttattggtcaagatgaagctgttgaagctgtttcacgcgctattcgccgtaaccgtgctggttttgatgaaggcaaccgtccaatcggcagtttcctttttgtcggacctactggtgttggtaaaacagaattggctaagcagttagccttggatatgtttggttctaaagactctattatccgtcttgatatgtcagagtacagtgatcgtacagctgtttccaaattgattggtactactgccggttatgtcggctatgatgataacagcaatacattgactgaacgtgttcgccgcaatccttattctatcgttttacttgatgagattgaaaaggctgactctcaagtcatcactcttctccttcaagtattggatgatggtcgtttgacagacggacaaggtaataccattaactttaagaataccgtgattattgcaacttctaatgctggttttggtaatgaagcattaactggtcaggaagataaggacatgaagatcatggatcgcattgccccttacttccgtcccgagtttttaaaccgtttcaatgcagtcattgaattctctcacttaagcaaagaagacttggatgaaatcgttaatctcatgctatctgaagtgaataccacgcttgctaagaaaggaattgatcttgttgtcagtgacagcgccaaggcacatttgattgaagaaggttatgacgaagcaatgggtgttcgtccattacgccgagttatcgagcaagaaattcgtgataaagtaactgacttctatcttgatcatacagatgttaaacatctcaaagctgaaatgcaagatgacaaattgattattgaagaagcttaatcctatgcaatttgagaggctagaatgctaattctagtctctctttttttaaattaatttttaccttggacaatccgtttaaaaatgggataaagtataggaacagctacaatggtaacaatcgaagttccaaaagtacctgtaattttagccaaggctcctaccattgctggaagtagagctaagccaccaatgaaactgttaatcagagtatatttaaaaagattgagaataatcttcgttaccgcagcaactagtccaacagtaaaaatagttgccggtttatcattggctttcatcgctttctcataaactaaatgcaaaacatagcaaacaagcagtgattctaaaatagttatccaaacttctgccgcataaccgttgaaaatatcaaaaagtcccaaaccaagtgcagctgctaaagcaccaaaacctgaaccaaaaacaagaacagcgataaccactaaggcattgcccaaatgaacaaactgcggtcccacctgaatacgcagaaattgaacactgactaaaatcaaggctgcaaataaactcacttctatcaaacgacgtaactcttcttttttcattttttctcctctaataataattgataattctttattaaatcaagtaaatgcggttcataacaaagaccatatcttaaatctctttctaatgctagggtcgtcatcatgacttcattcaaaaaatccaaagcaagacgaccagatttctcaagagaaattcctctaaaataagcggaagacaggattgctgttaatatatctcctgtaccataaaaatgttgtggataatgtttagccatcaagtaaaccaccttgtcttttgtacggtcataaatggctaaaccaatcttatctgcttcaaaagtaacacctgttaaaacaatataagaaggtcctaaagctgctaatttttttaacagtctttcgacttgactagactgataatccttctctaaataagctgtttttgttaaaaaagcagcttcagttaaattgggaataataacgtcagcgttttggcatagtcgtcgcatatgattagcatggccttgatcaaatccctgataaaaacagcctttatctcccataataggatctacaaataaaggcaactgtttcgcatttgcaaattctaagatcaggtctatttgctgactattcttgagatagccagttaccagaccatcaaaagcaattcctaaattctgccactgttctaaaaagcctgtcatacctactgtataatcatctatacgaagctgtttgaagccaccagtatgtgatgataagagcaccgttggtaaaatagctgtttctacttggcaagcagccataagaggcagactgctggctaaagcgaccttgccaagtcccggtaaatcattggcgataagtaaacgcggtaacatataaactccttaatgcatttttcaaaacgataaaaatattgtaagaaatttcaaaatagagtacaatagaaagaaatttaaactgtatggggacaaaatggttagtaaatatcatgaaatttttttaaatattatacagcaaatcgaagatggtcaactaaaacgcggcgataaactgccttctattcgtcaactgagccaagattttcactgcagcaaagatactgttcaaaaagctttgtcagaattgaaatatcaaaaatatatttatcctattctcaaaagcggttattacgtttttgaggataatcatgaagaagaaatcctacctccaatctctccttctaattaccacaatattgcttacgaagattttagaacctgcatgaatgagactttagttgggcgggaagattatctcttcaactactatcatcaagaagaaggattggaagagctgacgcaatctttacaggcgcttttcgtagacgaagccatttacagcaaaaaagaaaatatcgttgtcacttctggcagccaacaagccctttacatcctatcacagatgacctttcccaatcaaaaagagattattttactggaacagccgacctaccatcgcatgaacaccttggttaaatcgcaaaatcttccctacttaactattgagcgaggatttgatggacttgattttaatcgactagaggagatttttaaacaagaaaagattaagttcttttatactattccgcgtctatctaaccctttgggtttgtcatacagtcacaaagaaaaacaaactttggtagaattagctcataaatacgatgtctacattattgaagatgactatatggcagattttgacagagccagcaatgtttccttacattacttagataccaacgataggattatttatttaaaatcattttctatgtcgctttttcctgctttacgtttaggaagtttaatccttcctaagaaactcttgaaaaaatttcttgattataaaaatctgattgattacgatactaatcttatcatgcaaaaggcactctctttgtatattgataatggtatgttcgctaaaaataagaaacgtctcaagcaaatgtattatcaaaaaacatctgagttagcaaaagaattttcaacttttactctcaagcttcctcatcatattttccaagattcattaatattacaattaccaactaaagtcaaccttgctcttttaaagtatagactcaattcgcctaattttttggaaaaaaattatattagtacttgcccctaccactttattcaactgcaagcaggagaaaactggcagaatttgctaactattttcgagtaaaaatacagactagaacaaccattccagcctgtatttttcgatagcttaaaagtactatagctctttggtgagaatttaatcttactttatcttaaaacaatccaccataacctttaaattctctgtcaattgctcattctctcaggcctctgcttaaactttcaatatcatttggtctcgtacgacagcagccgcccactactttggcaccgaatgtatgccaaattttagtattttccaaaagcgtatgcgatatatcagcagattgtgtccacatttggtgttggccatcatagacttcaccagaattagggtaagtcactaaaggtttatctgttatatcggcaatctttttcaaaagactgctgtacactgacggtgagctgcaattaatacctaaagccagaatttgcgacgccttatcaatcagttcagccacttcttctatggctgttccgtcagaaatcgtagtgccattttgagctgtaaaactcatgtaagcttctacagacggaaattcttcctgtaagagttcaaccaaggcctgtgcttctaagaaatttggaatagtctcaagcgctaataaatcactaccctcatcaactaagattttaatacgtgacctatgaaaatctttaagaacttccttatcaagctgaccataattccctgtatattcagaaccatcagctaaataagccgcataagggccaacatcaccactgattaaaggataggggcgaacttgtttttctttttcactcagctcctgccagactttctctctagcatttttagctaaactaactgtcaaggctatcattttttcagcttcttcctgacttaaaccatagtcacataaaccttggtaactagcttggtaactagatgtagttacaatatcagaacctgaacgtaaataagtttcatgaatcgtttgaatgatacttggattttccaaaaggtatttggccgaccatagtttgcctgaaacatcataacccaaaaattccaattctgttcccaaagcaccatgtaaaataagataatcttcttgatttaataatgttttgaaacgtcccatataatctccttacaatgtcttatgccgccaataataataaagataacaaagtagaataaaaggtataccgaaataaagacccgctctttgtgatgcatcccaagcaataccaataatcgaaatcaacaatagcataatcgtaatgtaaggcagaattggagtaaaaggcgttttataaaacaagtcttcttgggcatgacttttcagccattccttacgaaaattaatttgtgccataggaatggacaaccagactacaacaacagcaaagccagcgattgacatcagagccaaataaacggtatctgccgcatagatacttgaaaacaaggataaaacagcacctgccatcgataggagcaaagctctcataggaacaccgtgttcattgattttaacaaccctcggactaatcataccttcgttggccaaagaccaaagcatgcggctggaagcataaagtcctgaattaccagcagacaaaatagctgtcaaaataacgaaattcatgatatcagcagcaaaaggaatgcccatcttatcaaaaacatcaacaaaaggagcactggatacacctgcttctttcattggtaaaaacgatgctaagacaacaattgtcaatacaaagaaaatcactaaacgaccaattgttgttttaatagccttgggaacagcttctttaggattattcgtttctcccgctgcaatcccgatgagctctgttccagaaaaggcataattaactgccagcatgactgacattaatgctggaagtccctttggcagagctccatgagctgtcaaatgactaaaaagaaatacttcgtgcttaccattaaaagataccaaaccaagcatagctccaaaaccaagaataataaaaacaagaatagctaaaacctttatactagaaaagaaggattctgcttcagcaaaagaacgaacactgagagcattgagaccaaaaataagcaaggcaaaaagtgctgcaaagacccaagtgggaacataaggaacccaccgtcccatcaacatacctgcaccaagaaactctgtccctaaagcaaccgtccaacaaatccaataaagccaagcaatggtaaaaccagttccaggactgatgaatttggtagcataagtatgaaaagaacctgtaacaggcatagctactgctaattcacccaaagaaagcatcacaaggtaaacaacaatagcaccaactaaataagaaattaccgctcctaagggaccagcttgagcaattgtataacctgaacttaagaaaagccccgttccaataacaccgcctaaggacaacataaagagatgacgactggtcatttttcgcttaaactgaccttcattttcaaaattatggttttccataagtcctcctaaagcttaatagctttatcataacacaattaactcatcttagataatagctattttctatcaagccgttagttagagactataacaagattccccgttgaatgcacctaattacatggaaatattagattcagaggaacgtactaatttatcaaaaaggctgtaatcaaaacatttctactacttcattttttctccactataggcaaagcattcacagatttattttatctaaaaaagcaaaaaggtatgactcactatgtttataggaatcacacccttcatctaatcaactttttaactatttcaccttgggaaatttaaagagactctaaaatggcatcccaagatgtatccaaacctgtccgatcaactgacgaaaagatgataaaagcatcattggaatcaaaatcaagtttcttttttatagcagattcctgtttattccatttgccacgaggaaccttgtcagcctttgtcgcaactaaaataacaggaatttcatagtatttcaaaaaatcatacatctgtacatcatctgaactgggatcatgacgaaaatcaaccagactcacgactgctcgtaaattttcacgactagttaaatactcttcaatcattttgccccacttggcgcgttctttctttgaaaccttggcatacccataaccgggcacatccacaaagcgaagcttatcgtcgatattataaaaattcaacgattgcgtctttccgggcttactagacgtacgagccagattttttcggcctaacagcgtattgataaaactggatttaccaacattagaacggccagctagggcaatttcaggtaagtcatcttgagggtaatgcgatttattgaccgcactaagaagaatagaagcattgtgggtatttaaaaattcactcatcacatctccatctccttaggaagctgtctcaagaataggtttgtcggtcccttctaccgctttcttagtaatgcgaacgcaagtgacatcctcttgactcggaatttcaaacatcagatccagcatcgtttcttcaataatagagcgaagaccgcgtgcgcctgtcttacgttcaatcgccttttgagcaatcgcttgaagcgcctcttgatcaaactcaagctcaacaccatcataagataaaagcgtctgatattgtttaactaaagcatttttaggttctgtcaaaatcttaaccaaatcatcaaccgttaattgctcaagcgcagctaaaactggcaaacgaccaataaactctggaataagaccaaatttttgaatgtcttctgaaataatttcttgcatataagaagattgatcatcaatcttcttattattttgaccaaagccaataattttctcacccaaacgctgtttaacgatatcttcaataccatcaaaagcgccaccaactatgaagaggatgtttttcgtatcaatttgaatcatttcctgttggggatgtttccgaccaccttgtggtggcacactagctactgttccttcaataatcttaagcagagcttgttggacaccttcaccagatacatcacgtgtgatggaaacattttcgccttttttagcaatcttatcaatttcatcaacataaatgatgccacgctccgcgcgttcaacattataatcagctgcctgaatcaatttaagcaaaatgttttcaacatcttcacctacataacccgcttcagtcaaggctgttgcatcagcaatagcaaagggcacattgagactcttagccaaagtctgtgctaagaaagtttttccagaacctgtcggtccaatcataagaatatttgatttttgtaagtcaacatcttggtcgtcttggctctcagtaaaactgatacgcttataatgattatagacagaaactgctaaagcacgtttggcacggtcctgaccgataacataactgtctagtattgccaacaattcttttggttttggaacttctgaaagatcagccaatacctcttctgctagttcttcacggataatttcttgtgataattcaacacattcattgcaaataaaaacgccattacctgcaataatttttttaacttcatcttgatttttgccacagaatgaacaatgcactgtgacatcattggttctatttccagccattttttcctctaacttctaattttcttaaaacagggttccataaaaagcatgaatggtatttacaatattagtcagagcatttaacaagaaaaacacccctaaaccataacgatttttcttaaatgcaggaacagcacataaaatacaaatcacaaataaaaaagcagtaaatacaccaaaaatacttctttgcatatcttaagccaatctcctcattcctttttctcaagtacagtaacagtaaagtcatgactgttattttcatctttttcaaaaaaagcttgagaaatttcctgaaaactagaaaaatctcttagaggaaaataagtatctccttcaaactgtccatgaactgatgtttttattattttatcataataactttcaaaagatttataaatagatgcaccaccaacaataaataaacttttgtcttgctgcctgtaccaagaaagagcttctgagacactgtggacaatgcttacaccttctgccttaaactgtggatcatgagttaaaatcaaggtatcacgtccagataacacacggcggttcataccatcaaaggtaacgcgtcccatcaatagagcttgccccatggtcatctctttaaaatggttcaactctttgggtaaatgccaaggaagactgcctttaactccaattaagtgtctatcatcttctgcccaaatggcaacaattttcttttctcgcttattgttcatacttttcttattttatcaaatttctaaaaaaaatgcattgaaaaaactcaaatgcattttgtctattgtatttaaactccttatttaagctaactgttcttgagttattctaagatcacgttcccattttacccaaccaacaatactattaatcatataaataatatacatgagcataacatgtggttctgcaccccaccaaagaaaaatgctgagaacattggtcgcaatccaaaagagccattgttcactgtacatgcctgtttgcagaaactgaccgctccaattggtaccatctgttgaactatcccaaaaagggcgatgcgaaccgattgatcgataaataaagccaaaaactaaccagacaataattgtaattccaagtgatttcaaccagcctaagggtgtcagttttcgtgatttaacatcctttacttcaactttcttttcctgtccttcacgatgtccaatcaaccaataataagcaccgacaaattgcatgacagtgaaaaataaggttgttaaaacttcaccataatacatattttcaaaactgagataaagatagagcatttcatgaataaaaccgatgaaataattactgatacgcccctcagcaacaaagataacacatagaattcctgtcagtgctgccgcaaaaccagcaatgtgccgtgttccaccgataaattctaaaaccagtgttggaaaactaagagctaaaaggtatagccactgcgacaggctcctatttttaaccaaatcctcccatagcgcttgtaatatcccccaaaagcctaattttttaccttcttgccacagccatttaaaattatcccagatattgcttgcttttctagacaccgttttgctccacctttttaattaatgtttgaaatcattatacaacgttttttacatgtgtcaagacatatattggttttttataaaaaagagccataattattggctcgtcatttttaaatagctaaatcaaattttaattgtggtttaaccggttcataatccaataattcaaaatcttcaggtttaatatcaaagaaattagttttatttgggacattcaataccaaatgcggttgacaaaccactggctctctccgcaataattcctctgcttgttcaaattgattatcataaatatggagattattgacaaaatagaagaatttaccaaccttccaaccaaaatgtttggcaatcatcatctgcaaagcgacatattgcatggcgttgatatggtgagcaaccagcatatcgttggagcgctgtgttaaggtagcatctaaataaatttcgccattcacacgacgaacatcgaacatggtttgaaaggcacaaggtaggagaccttctgttttttcaaaggcttcataatcccaaagagagatgacattgcgtcgattccaaggattttcttccaattgtttgagaattttattcataatatcatgtttcttaacaatggcaccataacgttctccgatggtccctgtttgcttgacttcccaatcattccaatacctaacaccgtacttatcatttaagatggctaattcgttggtctgatcctgatagatccagaatacttccttgatagctgacttgatagcaatcggacgaagggttgtgataggaaattctccttttgcaaggtcatattctgcaaaagcgcctgtaatatatttagaattggctgtcttgccatttttatatttaggacgagcctgttcgctccagacaccatcagttaagattttttttatattttttttgaaaataaaatctgccttagacattgcttctccttctatgattttaagaaaataatttaaacttcttttagatattatatcagaaaaaataggtttcgtctgatctgacagattctcccaaaaattgaatccttgaaagtttattcattacctttagtttaaattgtgataaaataactatgacattttacaaaaaagaaaccagataaaaaagaaaagaaggattgacttatgagaattgggattgataaaattggttttacaagcagccaatatgtcctgaatatgaaagatttagctgaggcccgtggcgaagatccccaaaaattcagtaaaggacttttgctgaatgctcttagcatcgctcctattaccgacgacgttgtcaccctagcagccggatcagccaatgaaattctgactgcagaggataaagaaaaaattgatatggtcattttagctaccgaatccagcgttgatcaaagtaaggctggagctgtttatgtgcattccttattaggtattcagccttttgcgcgcagctttgagatgaaagaggcatgctacagtgctactgcagctctcaactatgctaaactgcatgttgaaaaacatcctgacacgcgtgtgcttgttcttgctagcgatattgccaaatacggaattggaactcccggagaatctactcaaggagccggcagtattgccatgcttgtcaaaaaagatccccgtattcttattcttcatgatgagaccttagctcagacacgtgatattatggatttttggcggccaaattatacaacaacacctcatgttaatggtatgtattctaccaaacaatatttggatatgctgaaaacgacttgggcagaatatcaaaaacgttttgatgtttctttaactgattttgcagctttttgctttcatcttccttttcctaaactagctcttaaaggctttaacaagatcatggataagcaagtcccatctgatttgcaggaaaaacttaaggtgaattttgaagcttccattctttatagcaagcaaatcggaaatatctatacaggttcactctttttaggactcctttctcttttggaaaatagtcaaaatcttgtggctggtgataagattgctctttttagctatggtagcggggctgttgctgaaattttcacaggaacactggttaaaggtttcaaagaacagctacagactaatcgtcttggcaaactcaaaagacggactcccttatctgttgagaattacgagaaaatcttttttgaagaggctcaacttgatgacaaaggaaatgcttctttcaaagaatatcagacaggaccttttgccttaaaagaaatccttgaacaccaaagaatctatggtaaagtcaatgaatcctaaaaaaattaactggtcaggtttttctagaaagacattgcaagaacgcctgaaacatttagaaaaacatcagctgctaagcacagaagagttgaagaaactctgtcaaaatcaacaattacctttagagactgccaatcaaatggtcgaaaatgtcttaggaactttttcgctgcctttcgccctagcaccagattttctcattgatgggaaggaatatcaggttccttttgtaactgaagagccttctgttgttgcggcagctagttttgcagctaaaattatcaaacgttctggtggtttttctactaaaattcataatcgtcaaatgcttggccaagtggctctttatgatgtggataactttgataaagcacataaaaatatcttggacaagaaggccttactcctatctttagctaatgaggcacacccttctatcgttaagcgtggcggcggtgcttgcgatttgatgacagagattaaagggagttttctaattgtttatctgagtgttgacaccaaagaggccatgggagcaaatatagttaatactatgctggaaaccttagctgctcctttagaagaaatatctggcggacaaagtctcatggctattctttctaactacgcaacagaagctttggtaacagcacaatgtcaggttaatcttcgtttcctcagtcgtgataagacagaagccaaaaaattagctcgaaaaatggacttagccagtcaactagcccaaattgacgtttatcgagccagcacccacaataagggtatttttaatggcatcgatgctcttgtactagctacaggtaacgattggcgtgctattgaggctggtggacatgcttatgctagtagagacagccactatcgtggcctttccgcttggtcctatgatgacaaaaatgagatattagagggcaagataaccctacctatgcccattgctactaagggaggatctattgggttaaatccaacggttcaatgcgcttatgatttgcttggaaatccgactgctaaagaattagctgctatcattgctgctgtaggtctggctcaaaattttgctgcccttaaggccttgaccagcacaggcatccaagctggacatatgaaacttcaggcaaagtccttagccttgcttgcaggcgctaaggaaaaagaagtctcagctcttgtttctcagcttcttaaagctaagcatatgaatttagaaactgcgcaaacacttttaaaaaatttaagataaatttaaaaacttcatattataatcctttaaaaaatatcattgcagagatggtattttttctattcctcacttttttcttgacaataattttcgataaagatataatctagttattgagactaggtgttaaggagataagaatttggaaagcatactttatccaaaatgggatgatttacctgaacttgatttatatttagaccaagtcctgctctatgttaatcagaccacagatgctgctgctaaagacaaaggactaacagcttctatgattaataattatgtcaaacatggtcatattgaaaagccgatcaagaaaaaatataatcgaaaacaggtcgctcgtttgattgttattactgctctcaaaaatgtcttctctatccaagagattagccagactttgactgttttaacagcaaataactcttcaaaaaacctttataatgactttgtaacctgtatgaacaccgatgaaagacaagatattgcccctgtagtggtatcagcttgtcaaactctaaaactttatctgcaaacacatcagcttgtcttagaactagaaagaagtgatatcaatgagtccaacacaaactctgaaactaagtaaacaattgagttttggcgaagaggttgctaacagtgtgacacatgctgttggtgcagctattatgcttgttctgctccctatttccgccatttacagttatcaacattacggaatagccgctgcaatcggaatgtccatttttgtcatcagtctctttttgatgtttttgtcatcaactgtttatcatgctatgacttatgattcaccacaaaaatacgttcttcgtattattgatcacagtatgatttatattgctattgcaggaagttatacaccagttgcactttcactggttgggggttggttaggctaccttattattgttcttcagtggggcactactatttttggtattttatataagatttttgctaagaagattaatgacaaattcagtcttttcctttatttattgatgggatggctggttatctttattattccagctattgtcagcaagactggtctagctttttggcttttaatgttaggcggtggcttatcttatactgttggagccttcttctacgctaaaaagaaaccttattttcacatgatttggcatctctttattttactggcttctgctttgcaatatatcgctattgtctactatatgctataaaattaaaactccgcttcaaaaacggagttttcttattatttaattttgataaccaccttaatgacacctttaaaacaagccattattgtctctgtccttctcttaagcgcccatataaaagatagtcaacatttcgaagttctgcaatcgtttgacagttaagggcgcacatgatcaggcgcaaatcttctttccaaccatttacaatagcaatgacttcatgaacagaatgctgttcaactaattctaacatcgttcgagataaaccgaccgctttggctccaaggaccaaagcttttattatgtccaatggatgacgaatcccgccgctagccaggatttctaccttatccataagcggctgagcatttaatagaacttgcgctgtggtttgtccccattgattaagataagaacgatttccgccacgtctattttcgatataagcaaaactggttccgcctcggccagaaatatcgacagttttaacccctaggtcaatagcagtttggattgttttaacgtccataccaaaaccaacttcttttaaaataaaaggaagttgtagtttcttcgcatagtcagataaatgtttcttccaagacctaaattcgcgttccccctctggcataaggagctcttgcataagattaatatgaacttgaagaaataaaggctgtaaatccctaactgcctgtaagccagcctgataaggtttgtcaaggccgatattggttgctagtaataaatgaggtctggatttttttacctgataagaagtatcgtctggatttttaagagctgtactgtaagaacctgttacaaaaagaagaccacaggtgtctgctacctgagctaatttttcattaacttctttccccttttgacttccgcctgtcatagcgttgatataaaaaggaaaatcaaaatcctgaccagcaaaatgtgtagacaaatcaatctcggctaaatcataatctggtaaagaatgatgaatgagttctatgtcatcgaaactattatatggtgaacgatagtctaaggcatattttatatgatcatcttttctatttgtcatcgttttttcctataatttttcttgataaagcaattcaataccagctttttgccagcgttccactaaaaggtgactgtccctgtctttaaaagaaagagcaattccacaatcaccgccaccagaaccactgctcttagcaatgacatctagacctttctcagctgcttttaattgccgcaaacgttctgtatagatagctggattgagattttctaagagctggctgctagttgctaaactttcttttatcacatctttttgaccatttagcaagccttgggaaagtttttcgacattttcctgactgacttttaaaaaggatggcgtaattgaagatttaacaagattaaccatcttatttgaaatagagggttgtttggtccagccaacgagaaaatcgcaagcgattttaggatacaagactgaaatgcgataaccccaatccctctctaaaacagttcttaggtcatcagatactatccaagtccttactaattggcggtcaaaagctgtaaaataaaccaaattatcataggcaatgcaagccaaatctcccatggaaccattatcaccacgcttaattaaggtataggcagccagcttaaagatagtatctgtcgataaatccaattgatagaaacgagagagtgcttttaaggttaaaatagtaacactaccactagaaccaatcccgaattttttcccatcgcgtcccaattctccattaatttctaaggaaaaaggggataaatcagcaatttcttttcccaaaaaatttgctaaaaccgtaattgtctcttggatcaggctataattagagtcagccgctatacccacacaataagcaaacatatcagaccaaattgaaatttctttggcagatttgatagtagctgtcatataaatggggatgtttttaataatggccgactgactgggagttaagatagcatattcaccagcaatatatagtttaccgcctgtttttacttgaatgatattatccatgttaaagttcctttgttttagacacaataatctgatagtcttgcgcaaaaatacgagatagacgctccaaatctttctcgagacacaaaactttgacattaggacctgcatccatggtaaaataacacctttcaccttgccgtcgcagttcttttactctttccatagcttggtaggaagctttagttaaataagaaaaaggaggattagcggtttttgttgttgcatgcatagctaaagcattagcttctgttaaatcgccgactttttcaaagtcagcagcttttaaatagtccaacatagcaacataatccttttcagattgggcaatccaatcagcaaaatttgttgaggtctctgaacaacgctgcataccttgacggctcgaaataggttttctggtatcgttcaaaaccaacataatcatagctaactttaaatctgacggtacaggataaatctcacctgaatctttatcccatgccgtcaagggtccaaaaaaagaacgcgaagaagaacctgaagcaaatttggctatttgggcaagttcttcctgagttgcatttgtttcaaagaatatattggcagccttaaccaaagctgataaaccgctagaacttgaagataaaccagctgccgttggcatattgttggaagtctctaccttaacaaaaaaaggagtctcttttctaaaaaaatccagaaccttactgatttttcggtgctctgcttcattttgtaaaatatgatcaatgtaaaattcatcagcttctgcatttcttaaaagagtcagtctagtttccgtatacatattttccaaagtcaaagaaatactactggttgccggaatcatctttttagtatttgtcttaccccaatatttaatgatagcaatatttgcataagacttcacttttacagattttacggtcactttggaacttcccttcttaagtttattcattatgattgcattatcattttaatataaaaatgagaaaaaagcgaccttaagcaaaaagaaatttcttaactcatttacaaaagaagcctatctgactaaaaaattccctaagtcagaatgttcatttctaacttagagaactgtaattctttttatcaatgcagtggaaattttctttataatatataatcaactgagtaactatcatcagacagaatccgggctaaaaagcgacgcgtcctgtcttctttaggtttcgagaaaaattctttgggcgaagcttcttcgatgatgtgcccaccatccataaaaatgacatgattggccacatctttggcaaaactcatttcatgcgtgaccacaatcatggtaacaccttcctcagccaattgtttcatgacacccaaaacatcaccaatcaattcagggtcaagtgccgatgttggttcatcaaaaaagataagatctggcttgactgcaatggcacgtgcaatcccaattctttgctgctgaccaccagataattgactaggataataatttttataactcaataagcctactttttcaagagcttgttctgcaatttgaatcgcttgttctttgggaatctttcttgcagtcattaagccttctaaaatattctccaaagcggttttattaacaaaaagattatagtgttgaaaaacaaaggccgtcttttgccgaatggtcaaaatttctttacgattaagtgttgccaaatcataagattgtccatctaaagttagatgtcctttatctgctttttccaagtgattaagacagcgcaaaaaagttgtttttcctgaaccgctaggacccaaaataacgacaacatctcccttgttaacagtcaagctaacattgtcaagaacaagtttatctccaaattgttttgataaatttttaatttctaacatgtattctccttaagcaaaacgcttttctaaagttgaaaaactccactgaatcaaaccacagataataatataaataatgaaaatcacaagataagattcaaaatattggtaaccatgagccgcttcaaccttagctattgctgtaatatccttaactgtcatgacaaaaacaagcgaagtccccttaacaatattaatcaccaaattacaaagattgggaagagcagacctcaaagcctgtgggaaaataattctgagataactttgtgtcgttgttaaaccaatagactgagctgcttccaactgtcccttatcaaccgttaaaatagcagatcgtaaaatttctgatagactccctgttgtcattagactaaagataataaaagcataataaataggattaagtttaaaaatatctaatccgcttgattttaaaatggtatttaaaacactgggtaaaagactgtaaaaaaagagaatcaaaagaataggcggtgttgctctaataaaagctagataaacaatcgaaaaagtcgtcacaccttttaccttgtaaattctgcccaaagccaaaaacaaagccggtaaaaagctcagcagtatagagactatcatgatgactaaggtcacaggaacaccctttaaggaaagtaaaaatgtatgaaaaatataagaaaaatccatatgacctcctaagcatttcctttattaagactgtgttccataaaatgtgataccagtgacaaaaccaaggcaattccccaataaataagggcaacagctgtataagtttccagagagtaattccccaaattccgactaataatcagatttcctgcccccatgacatccactaaaccgattgtataggctagagccgcatctttcatcaaatttaaaatggcagttgttatattgggtaaggcgatttgaaaggtctgcggcaaaagaatacgcctaaaggtttgaaagccagttagaccaatactgagaccagcttctaattgtcccttaggtacagctaaataagctgatttgaaaacttcagaaattgaggccgcaaatagtaataccatagttacaacgacaaaaatagcacgtgaccaatcgtcaacatccaaatgaagccaccaagtcaaaaattctggcagaccataaaaaacaagaaagagcaaaacaattggcggtgtacatctcaaaataaaaacatatcctttagcaaaggctgcccagctgtttttagaatccacttgtgcccaagccagacctgctcccaacaaagaacctaaaagaacggttaaaaaaatgacccacaacgttaaaggaagagcatttaaaatagttggcaaaaatttaaaaacataagacggtgtataagaaaccatactgacctcctattttgtgacatagttaaagacatcttccccaaaatacttcttagacagtttggctaaagttccatccttcttcaattctttcacagccttattgtaagctttaacgaacttttgattggctttattacgatgaatcaatgggtaagtttcgatacctttataaggaatccaagtcaacttatcagcatacttatgataagcaccatccttatccttcacagcctgtttaaaggagagttttatatcaaaataagcatcataacgtccctctaaaacccaggcataagcatctgcaaccgtaaaactttctgctgatttcaaatcaattggagtatctttatgttttttattgtaagcttcaataacattccactgagcattttgcggagaaatagggacaagtttgcctcccgatttcgcaaaagaattaataccagtaattgttttttcttcatctttcctaatagtcaagccgatgacactggcaccaagagcatctttagggataataaattttttggcacgctcttttgtgtaccaagcccctttagtcccaatatcatacttgcctgattcaagtccgataagcaaatcctcatcacttgttcctgtatatttaaatttataatcaggtagttttttatcaatagcttttaaaacgtctacttcatagcctgtattttctcccttgtcattcacatagtcatagggagcataattttgagtatgagccacctttagagtagtcactttctcattagcaccatttcccgccaattgacgtccaataatcgttccaccaataagaagaagcaatacgcctcctgtaacaatccatgttttcttagtcatttgaataatctccttctttcaacttataaagttaccgcttctttgacccaagcaatacgctcagcagcaatatcacttggaatcgtacaatctgctcctataacagtggctaacgtaccagattcttgtaacaatttctttacttcagtttgaatatcatccttacttcctttatagagaataccgtctttagtgttaacaaatcctcccaaaacggttttaccgccaaaaagtttacggccttgagctaaactgataccttccggaccaacagcccaattaaaaacctgagccggataatccttgaagagtttgatatcattgcttgctccttcataaccacagatatgaagaacagttagaccttgagcttgctgagctgcctcaataatggtcaaatcactaggtgtaatatagttccgatagtcctcagacgttacattgctgtcttgaatggattgtacactgagataaatcccttcaagaccagcttctgcaataatttttcttgttaaggtagcaatatcgccagcaatcacatttaaaaccttttttagagtctgagcatcttcttgtaaaaatcgggcaataatgccatcaccatgagccacctgtcctgataactgccatttaagataagtgactggagaaaaaatgttataaatagccacaatatcttcagtaaaactttctttaatagccttgactaactgcacttgttgatcaaaccaagggtgattttcaccaatagaagaaatattggctaattcttgaattgatgtaacatttgtatgaatcaattcatttggataagtgaaaaaaccatcactcatcaatttgataaaatcaggatctacttctttaataaatttttgatgtccttgaagattcttcttaaaaagttctggattatcaaggccttgtccaaattcttcttctgccaaaaaatgataccaaaaaccaacaggaactttgtctaccctttcacctttaaaagcctttaagacccattctttcttactgtctgccataaagtccatctcctttgaaaataatatgactttatcctaccatctcctcaacaccttgtataatttatcttttttatggttggctataaattttatttatggcaataaaaaagagcttaaataaaggaaaagaaaaaacaatagtaggccataagaaaaagttatcacttctttgtttttttctatcggttttttacggattttcctgtgtttcttttgttataatgtcagaaaagttctagaagaaggagattattatgaattttcaacaatgtcgttatgttgaggctattgccaatacaggttcttttagtgaagctgctaaaaaactttatgtcacacagcccaatctttcctcttcaattaaagagttagaaaatgacttaggagtacagctttttattcgctctaatacgggtgctcgcctaacagatgatggttatgattttcttaagtatgctaaacgcattttgggagaagctgatcttcttaaaaaacgctaccaagacaactacaaaaagagctttaccattagttcgcatcactatgattttctagccattccgcttcttaaaatagccgaaaaattcaaaaaagactttcaacattttcacctgattgagacaacaaccaaaaaaatcttagaaagcgtcttaaattttgaaagtgacttgggtattctttatcttaacgacgataatcgtcatattttagaacgttattttaaacagcatgatcttgcttttacacctctcggggtttttcctacacggattttccttagaaaagatcatccgctcgcccagcaaaaggtcattgaaaaagtgcaattaaaagattataagcaagtccgtttcagacaagaaatttcaggacttaactttgacgaagatacccttgatattcctgaaaatcaatctgtcttttacagtaatgatcgcggtactatcatgaatatcctctgtggttcagatgcttatgcttcaggattgggtattgttaacagttttatcaaggatcaaattgttctaatccctcttaaagacagcaaaatgcatacccttggttttgttagcaataaacgtaaacaagaaactgatattactcagcaattcattactgctgttaaaaacagtcttagaacatacgagagaggaacacaattgtgatttggcaaaaaaagtataaaaatgttcacttgttccaagcagacttccaaattttatatccctcaaacttcttataaggacaaatttcttgcaaagtttgataataaattctataatactaaagcattaccattaggaggcaatcatgtcaattattaaaatgcttattatcattctggtcgctttggaattcttttacattatgtatttggaaacgttagccacacagtctacaaagacatctcaagtttttggcatgactcaagaaacattaggtgaaaaagaaattgatgtactgtttaaaaatcaaggtatttataatggccttcttggtttaggtctgctttatgggttagcttttaatacagctatcattttaccaatcttgatttacattattcttgttgctgcgtatggtgcttatagcagcaatccaaaaattttgctgacacagggagggttagccattatcgctgcactactttatctcttttaataggttaaaaatgaggtcaggataaaaatatcctaacctcattttttatatcaaaattataaaataaccttaaaagtaatggcatcattcttataggagaccgaaatttttcctttaaaaattttaacaatactctgagccattgacaatccgatgccataacctgatgtctgattgttatgcgattcatcttcgcgataaaagcggtcaaagaaacggctataatcaatttcagtaccttctttaaaggtatttgaaacctctagtcttgcctttttaagaccattggttctgctaagtttgacacttactgtccccttatcatcacaatatttattagcattatctactaaaagagtgaccaattcaaagagggatttttcttctgctttgacataaatatcagaagcaatctgcatctcaaacgttttaccatctttaatgatgggagctttaaagtcttctgctgcatcttgcacaatttccgaaaaacaaactctttcaagaacaatattcggctgctcttctaacctagccaaagtaactaattgattaattaaatgggtcaagcgttcaacttgatccttggtacttttggtccattctgtttcgccagtcattaattcttgcaattcattattagcagaaataatggataaaggggtttttaattcatgtccagcattagtaataaagcgtttttgtttctcataattttcaaggtaaggcttaatagcatagcctgaaaaaacagaaacaactaaaatgaaaaagagcaaactataaaaggacatttgaatagacaaattaattaattcggaacgatcagcaaaaaaacgagtagcatccaagacaacaaccaaatagcgaccagatggattcatttttgtcacacggtaagaataaaaatgattgttttttctaaaacgtccgtctctttcatggagattaatatttctcatataagactctgcctgttcttctgtcaaatgagaaatatgacttagattaagagaaacggtatcttttttcctatccactataaaactgtaatattggtattgattaataacagctactgacaatcctcgatttcctacctccctgttaatttctatcggatcaggaaattctcctttatttctagataaaatggtcaaaatagcattgatctcatcgttattttgaacataacgaacagaattaaaaacacccacaaaagaaatgaggatacataagatagcaaaagaggcgacaaggataaaacggaatctgatcttacgaaacatgctcatcacccgccaattctaactaaggtaaaatcgccattctcttctcctaagatagcaagatttgccttaatagattttagtttttgtctaagataagaaatatagataaagacataaccttcatcaatttcaggatcatcatcttttgcccaaacatgctgaaaaatttctttggttgataaagatttattaggattaagcataaaaaaagccatcaattttgattcttttcctgctaaacgaatagaattgcctgacaccatttcttgctgagcaagatcaagtttgacactgccaaaagttaaaactttatccgtaaaacgatccagacgccgttctaaggaagccaagcgcgctaaaagttcctttaaagaaataggcttggttaaataatcatcagcacctgcctctaaaccagttactttgtcttcaatttccgacatagctgtcaacataatagcatgcgtatgatccccactggcacgaatctcacgcaaagcttccaagccggttttaattggcatcatgatatctaaaataaaaacatcataagcattttcatgtgctttttcgatagcatcttgtccattataaacttgatcaacttgataaccttgatgctttaaagctgctgtgtaaacacgcgacaactgctcttcgtcttctgctagtaaaatcgttaaagacatttattcaccacttcctacaatcaaatttcggatggtctgcatagagagatcacaagaagctaactcatccgcacagcgctttaattctttagcaatgcgctctgggttcttgatatcgtgtttgtatttcatctggtgctccaaactagcccaagaatccatagctatcgttctcaactgaacttcgacaaaatattttcccggttgctgtcccaagcaatcctcaaatggcgtttttatttctaaaatcaaatgataagaacgataaccattaggtttagcattgtaaatataatctttttcattatagacattgacgccatctaaagttttaaggatagcaaccattttataaatatcatcaacaaaaccacagacaatacgaatgccaatcgcatcacgaatttcttttagagctgactgcgccgttagaggcagctgtttacgctgacatttctcaatcatactctcattggtctttatacgtgcaagaaaatgttcaaacagtttaaaaccagtatctttttttacgcgttgattttcgtcttgaattttttggctgaaatgctctaaaatctgagacaaataagcttgatatttcccatagatcgtttcttgtgacataattcatccttcttacatgcttgttctattataacatagaagattaaagaattcttattttgccaaatggtatgagaagttccaagccataatgaggtcacaaacaaactaaataacgatgaagtcagcaaggcatcgttttgatttttgaagagtattaactggctgccataaccacaaaaagcctagcattatctgcatggtaggctttttgtggtttaatcagtcattagtgttttctaaaagctggtttttttgacatatcttattccccataataaaagaagagagacaataaaactaattacagcagcagctgagaagatgatcttactggcaaattcgcttacttgaatggccttataaccgcttaaaaccatcaaaagcaaaaacacgacagtaaagataacttgactagtaactgtagcagcagaactttcttgtacatttgcctctctagcttctttaatgaaataataattcagaccagctgtacaaagcgttataattaaaaagcaaacctgaacaagcaggggagatttaaaaatagcttgtgtcaaaaccataattaacaaacaaatagcaataagctgtgctgttaaaagtctcattaacttcagtttctgacttttctttctggacacatctttctcctcacctaaaataatattcatttagttggctgtacaatacagcattaggctttccttattaataacataaagatattcttagtataacagaaaatatcctctaacggagtcaaaaatcctaaatggtagcaattttgtcctaaacggtaaaaagacacagaaactgtgcctttttactaacttatttcactgctgcaagggcagcgtcatagttgggatgattagtcatttcatccaaatattcaagataggtaatcttattatcttcatcaagaacaaaaacagcacgtccaagcagatggagttcattaatcaataaaccataagcctttccaaacgaataatcatagtaatctgacaaggttatggcatcattcaaaccagctgcaccgcaccagcgtgcttgtgcaaatggcaaatcaactgatacagtgatgacaacagtattatcagcatctgataactcctgattaaaacgacgtgtttgtgcatcacaaacgcctgtatcaatagatggcacaacgctaatcacttttttctgaccagcaaaatctgccaaagtttttttagacaaatcggtatctgtcagagaaaaatcaggtgctgtatcaccaacctgcaatttcttaccagcaagtgtcaccgtatttccattaaaagttgtcataaaataatctccttttctctactagctcttattgtaggatattttctccttttaatctaatgatttgattggaaaaatgattttaaatattaatagaacaagataaataaaattcacactttatttagaaataataaaaaagcagccaaaaataacaataaaaatatgtttattttttgaccactctttaaactcatcaagccacttcttctgtaaattgactattatagagatcggcatagaagccattttctgccatcaattggtcatggctgccttgttcaataatattaccatctctcatgacaagaataagatcagcattgcgaatagttgacagacgatgggcaataacgaatgatgtccgcccctccatcaaatgatccatagccctttgaataagttcttccgtacgagtatcaacagaggaagttgcttcatcaagaatcagaagcggtgcatctttaagaagagcacgtgcaatggtcaagagttgtttttgaccgactgataaggtgaccgaatcatctaaaacagtatcataacccttaggtaaagtcttgatgaaatgatgaacaccaactgccttagctgctgcaatcacttgctcatcagtgatatgtttttgattataaatcagattttccttaactgtaccttcaaagagccaagtatcttggagtaccatggcaaaagcatcatgcacttcttttcgtgtcatatcatggatattaactccatcaatagaaatcatccctctatcaacctcatagaaacgcataagtaagttaacaatcgttgtcttacccgcaccagtcggtcccacaatagcaattttttgaccagccttagcatgagccgagaaatcatgaataatagttttatcaggactataaccaaagaaaacattgtcaaaattaacatttccttcaactttttcaagttgtttaactttatggttttcgtcttctatttcttcctcatcaagaaattcaaagacacgtcccatagcagcattagctgattgcaattgagtgattccttgagcaatctgcgcaatgggctgagtaaaaatacggacgtaagtcataaaggcaacaatcgttcccatagtaatatcgccgttaatagccatggtagcaccgacaatacagaccatgacatacccaaaatttccgatgaattgcataaggggcatcataattccagaaaagaattgtgatttccacatacttgcaaataattggtcattcaagttttcaaactgcttcttgctttgctgaatcgcattgtaactagaaaccacattatgacctgaatagacctcttcaacataaccgctgacatcggctagattagcttgttgctttttaaaaagcggctggctcttggccatgataacagtggataacacaaaaccagcaaaaacagacaaaatagcggtcgctgcaagagctccattggttttaatcatcatgaaaatagagccaatcaggagaattatagctgctaccattgaaactaaactttggttgaaagactgtgtcattaaatccacatcattggtcactcgagacaaggtatctccttgtgaatggctgtcaaaatatttgagcggtaccttattgattttatctgcaatggcattgcgcagacgttgcgaaaacttttgaatcaaagtggacacaataaagctagcagtataagaaaccaaagcaccagcaaagtataagagagccaaggttagagcaatctcaccgattttatctaaatcaatttttcctgccagccctttggtcatggtatctgtcatctctttcagccggtcaggtccaataacagtaatcgtacttgaaacgatagtaaaaatgacagcaagtccaaataaagccttatagcctttaaggtaaggagccatttggcttaataatgatttcttcttattttccattttctaactcctccttagatagttgtgaataagcaatttcttgataaatatcgttattagccagtaattccttgtgtgttccttgaccaacaacctttccctgatctaagaccaaaatatgatcagcatccataatagttgaaatacgttgggctacaatcaacttagtcatttctttggttttctttgccaaatcatttcgcagaatgcgatccgtcttataatcaagagctgagaaggagtcatcaaaaataagaatttctggtttgcgtgcaagtgcacgggcaatagctaagcgctgcttttgaccgccagagaagttggtaccgccttgagctacctcggtatccagacccttttctttttcttcaacaaagtttttggcttgggctagttcaagagcctcccaaattttagcatcatcaagcggcgcttgatcgctttgcccaaatgcaatattagaacgaatggtcccactaaaaagcactgccctttgcggaatatagccgactttattgttgaggtcatcatggctgtaatcttgcactttgattccatctatcttaatccaaccttctgtagcatcataaaaacgaggaatcagattaacaagagttgattttcctgagccagtggaaccaataaaagcaactgtctcaccagctttagcactgaaagacacatgctcaataaccgcacgagaatttttactgtaacgaaacgatacatcatgaaattcgacttctccttttcgagcattgtctgctttagaatattctttgaagtgtacagatgagttaagcgccaatacttcattaattcgtttggcagaaactaaagcacgcggtaaaatgataaagatagcgaccatcatcataaaaccgacaacaacctgcatggcataagatgaaaagacaaccatatcactaaaaacactgatacgatcagcaatagctcctttagcagctgtcacactcgtcataggaattttaatatcattgagcaggtaagctccaatccaataaatagctaaagttagaccactggaaacaactgtcatgacaggattcattagcgacatcagacgatagaccaataaattcaatttcgtcaggtttttattttcccgcttaaatttagtgtcctgataatcttctgcattgtaagcccgaacaacacgaacaccagtcagagattcacgggttgtagaatttagagcatccgtcaagctctgcacctgacgctgtcttggaaaagcgacaaacatcaaaacagacagcataataaagacaattaaaacggcaacaccgactgctcctgtccattcatcgcttttaccccagattttagtcaaggcccaaacagccatgattggaccgcgtgtcaccacttgcattcccataacgatcatgatttgcaactgtgtcaaatcattagtcgtacgcgttagaaggctgggaatggaaaatttcttgatttccgcctctgaataatccataacccgattgaaaatatcagatcgaagacgggtcgtaaagctagcagctgttcttgaagctaaaaaaccaactagaacggccataaaaaagctcccaaatgaaaacatgagcatcttagatcccggatccataatatctgaggcggtcgttcccttagtctgcagcaaggttgtaatgttggacatatattcgggcgtcttcaaatccatccagacagccaaacagataaaggcagtactaaggagaaccatgccccattctttagcatttagacgtttaaaaattttaaacatgaattactccttcttttctaaattttgtttgatttgtttaaaaaccttccgagcaactgataagtcttcctgactaatatcttttagaagcaactttttaagatctgttaaaaaaacagttatttttccagctttttcctgacctaatggcgttaaaacaatttgcttgtatcgtctgtcttttctggaaggaataacagaaataaaaccatttttttccattcgtttaatgagattactggtcacagattttgagatatctaaccttttttcaatatctttaataaaaatttcctttccttgattatcctttaaaaacataactgtccatccctgaggtccggacagatgttcaacaccatggcttttggataattcttgaatatatctttctgttgctgtaatgaggtttttaaattcactaaaaggctccttcataaaaacacctcactttttatgagaatattataatagttctcatgaaaactattataatgattccttaaactattgtcaagaaaaaagtttctatgagaactaatttaattttttatagcttgatggtgataaagtcactttaaacgattgctttttcgctgtagtgaaagtgctcaaaccgcttatagttctatcatgaggtgttggtaagacctaggggcgccaaaaagaatggaactcccttgaatttctaaaatagtccgctggactattcacttttcgccttcattacttaagaaaagccacaaccataaaaagaataattcatttccaaacaagtctaatccttctgactactttctaagactggctttattgaacaaatttgctttttccctattttcatgttaccatattgaagaattacataaggatgtttgggagaagccatctataaaaaaaaccagcctattatttggcagctcctatttttatattaggagcttttttactgctcaaaattatccttaacgaaatttaaaggagtttttatgaaacgtcaatcagctcttgtcgtctttagcggtggtcaagattcaactacctgccttttttgggcaatgaagcattatgaatatgtcgaaacagttaccttttcctatggccaacgtcacagtcaagaattagaggttgccaaggaaattgctgcagaacaaggcgtgaaacaccatatccttgatatgtctttactgggacaaataacagaaaatgccttaacttctgacatagctatagaaacaaaagacggtgaagtccccaatacttttgttgatggcagaaatcatctctttctttcctttgctgcagtccttgccaaacagcgcaagataagagatattgtcaccggagtctgtcaaacagatttttcaggttatcctgactgtcgtgatgtttttgtcaagtctctcaatgttaccttaaatcttgctatggattatgaattcgtcattcaaacgcctctgatgtggctagacaaggccgaaacatgggaattggcagatcagctaggtaaatttgattatgttcgtcaaaagactctgacctgctacaatggaattcgaggaactggctgcagacaatgccctgcctgccatttacgtcaagctggacttgaaaaatatcttagtcagaaaggaaaaaattaatgttcttagcgccaaaagaaattaaaaacgagacaggagaatcacttctttattgtcccaaacgcgttcttgtatctaaagaattcacctttaatgctgcccaccatctcttcaattatgaagggaaatgcaaagccttacatggacatacttatcatttacaagttgctgtcagtgcttttcttgatgaacgcggaatgacttatgattttagagagttgaaaaggatctaccaagaatatttagaaccaaaactagaccaccgctaccttaatgaaagtctgccctacatgaatacaactgctgaaaatatggtttattggatttacaaaacagtcgagaaagctttaactgacgagcgcggtttacaaatggaacatgttcgcctttatgaaacaccctcagcttatgctgaatttagaagagaatgggatttacaagcatgaaaaaacaacgtctgttaaagttacccgttttagaaatctttggtccaacttttcaaggagaaggcagggccatcggtcaaaaaactatgtttgttcgtacaggtggctgtgattatcactgcgattggtgcgattctgcctttacttgggacggttctgaaaagccaactatgatgaccagtgaccaaattattgaagcattagataaacttggtacttatgattatgtgacactctctggcggcaatccttgccttctggctgctaatatggcccagctcgttaggaaactcaaaaaaagacaagtcactcttgctgtcgaaactcaaggttctcgctggcaagaatggctaaaagccattgatcaagtaactttaagccctaaaccgccgtccagcaaaatgaaagtaaacttacaaacccttgattttatcgtatcaaatttagatccacaaaaggtaacttacaaaatccctatctttgacgaagacgatttaaaattcgcccaaatgatccaaggacgctatcagccagatgtcctttatctgtctgttggaaatccagagcccaaagccagtggtgatattgtccaaaatcagctgaaacgtttaaaagagttatgggaacacattgctcaagatgattcttggggaaatgtccgcgtcttaccgcaattgcatacacttgtttatgataataaacgtggtgtctagaaaggaacaaatatgtcacaagaagaaataaaagacttaactcttttgggaaatcaaaagaccaattacaactttgattatgatcccaatattttggaagctttcgataatcgccatcaagataacgattattttatcaagtttaactgtccagaatttacctctctgtgtcctataacggggcagcctgattttgcaactatctatctctcttatattccagataaaaaatgcgttgaatccaaatcactcaaactttatctctttagttaccgtaaccatggtgattttcatgagaattgtatcaatacgattggtaaagatctcgtcgatctattacagcctcgttatctagaagtctggggcaaatttacaccgcgtggcggtatctctattgatccttattataattacggacgcccaaataccaaatatgaagaaatggcagcttatcgtttgatgaaccacgatctttacccagaaacaattgataatcgttaagcttttgattaaaataattagcaataaatgcccttaccgtctgcatttggcatataaagctatagaccccctttctcctttatattataataaagacaggaggtcactatgatgaaaaatgaattgaaaacttttcttaaaccaactcttcgtagagtgattgttatcctaagtatcaccttgctgctgtcggctttcttatactggggacaaagggatcgctttaatgccagaaatgttttatgtactggaataatcattaccgcaattgctggcgcttggaatatctacgatcttaactctctgtctctcattaagcgcagtcttattcattttttattaatggtcattactattttacccacacttctattaagcggctggttcccaataaaaactttcggtgacatcgttttaatgattgctatctttttgttcagcggtctgctttgctggacaatcggataccttgcttttcgaaataaaaaataaaggtctggaaactcacttccaggccttatatatatatttattgaaggacttatttaagaaaaccgtaacttaagaatacattgtaagcttgtattcttaagttactagtgtttatacaattccttgtgctgacatagcatctgcaaccttaaggaaaccagcaatgttggcaccaactacgaggttgccttcttggccaaatgacttagctgctgctgcagagttgtcatagatacccttcataatatcgtaaagtttacgatctacttcttcaaatgtccatgctgtacgttggctattttgtgccatttcaagagccgatacggctacaccgccagcattggctgctttggcaggaccaaacgagacgccggccttaagaaagacatcaattgcttcaagagttgaaggcatattagctccttcagaaacagcgataaccccattagcaacaagcgttttagcatctgcttcattcaattcattttgagtagcacatgggaaagcaagatctgctttgattgtccagattgaatcaccacctgcaggtgtgaagcttgcatttggacgtgcatcagcatatttgatgatacgcgcacgctgtacttctttaagctctttaagaagagcaacatcaataccatctggatcataaacataaccagatgaatcagaaacagccacaactttagctccaagtgtctgcaatttttcagtagcataaatagctacattacctgaacctgaaacaatagcagtttttcctgcaaagtcttgaccacgcgctttcagcatttgttctgcaaagtaaactgcaccgtaaccagttgcttctgtacgggcaagtgatccgccccaagtcaaacctttaccagtaaggacacccgtgtattcattgcggaggcgtttatattgaccgtagagatagccaatttcacgtccgccaacaccaatatccccagcaggaacatctgtgtctgcaccaatatgtttgctgagttcagtcatgaagctttggcagaaacgcatgatctcattatctgacttccctttaggatcaaagtttgagccgcctttaccaccaccaattggttggccagtaagagaattcttaaagatttgttcaaaaccaaggaatttgataatagattggtttactgatggatggaaacgaaggccgcctttgtaaggtccgatagctgatgaaaattgcacacggaaaccgcggttaacttggacttgacccttatcgtctacccaaggcacacggaacgaaacaatacgttctggttcgaccaatcgttccagcagattttcttcaatatattttggatagttatcaaacactggaataagtgattcaaatacttcctctacagcttgtaagaattctggttcatgagcattttgtgctttaactttttcaaaaacactagcaacatactctttacctgttgtcataatatattcctccgaaagttagtttcgtaattttgattacgtagaatattataaattttctgaatattcttgtcaagcattttcttattttttgaaacaatttattctttcatgttataaaaaataacattcattagattaaaatgtagccaaatctattttcaacataacttttttagctctgcatattttgattctaatttctcctattgtagttttcctagactcttaatgatttcacaccttactctctatgttgactttatcagcgggtgccctttgtatcttgattttaattgaacacaggctacggattgtggcaaaaagatgagtcctcctagaatcttaatgattccgcgtcacactccctattttgcctttatccgtttaacgccctttgtatcttgatttaggtatagaattctatttttctgaaatcatccactggattatttcatctactggcaatctcaaacagtttagaaaactgcttgagattgaaaggaaagtttcaaaagaaaaggttggtttcaatctaagatataatctttttcaaacttaacgtcaaatttctagaggtttgacttttgacaagttatctatcattttatacaattaagaaaacagtttaaggagttcatatatgaaatggtttacacttatctcaggagttttaacatttttaatcgggatttggatttttgctaatccgcttgttgtcactgcttcaattggttggctgctagcgttaattatttttttagttggtattacaggatttattgattatatgtctaaatcgcgtgaagaaagaaccatctggaatcttttacaaagtatcgtttctatcatttttggattcatccttctaacgtcttccatcttttctttaaccacggcggttgttaccattgctgcttactggattattttaatcggtattctaagacttatttccggctatcgtttgcgtcagatgggctttccacaaagtaatcggttcttttggacgggtagttttgcgcttttattgggactcattctattaggtcagcctcttctttcttcagccattatcggtcggtttgtggctcttcttttaatggcaacaggtatttccagcttccttgtttttctgcgtttactggaataagcattatcataagcacagctcctaaaatcactgatatagcaatgattttaggagtttttttatttgtttaaaaaagattgacaacattatccaagatgaatagttttctgtgaataaagggtctaaaacaagaaaacgcgatcagacttgctgatcacgtttaaaatactgtcagtaatatctagcgataccccaacggtcaatgccaatgcgtcttccattggctaaagtgacgactttgttgtaaaccatgttaccactattcttatcataataacgaagaagccctcgctcatcataagcaacatcacctttaacttgttttccttctcgcgtaaagaagacacgctgaccgttaatgcgttggctgcctgtcagagcttcaccatttgaatcaagataataccaattaccatccttatctgcttcaaagcggttaacttgtaattctcctgagtcagcatgataataatgaactttaccattataagtgacaaagctgcctttgacttgttttccgtcgcttgcaaaatagagctttttaccagcaattgtctgactgcctgtaaccgcaacaccgtctgaaccaaagtaataccaattgttttgactgtctgttgcaaagatattgcgtgctaattctcctgaattggcaaggaaatatttcagcttaccattgtctgtaataattttacctttgatttgcttaccatcttggccaaagtaataagtcttaccattaatggtttggacaccaaccaaggcaatgccatctgaattgagatagtaccaatcgccgtttttatcatttgcaaaacgattaacagccatatttccagatccgtcatcaaaataacgctttttgccatcgctgcctgttatccaagcacctttgacttgataaccatcttgatcaaagtactgcgtattgccgttaattgttttcaaacctacagccatgactccactggcatcaaaataacgccacttactatcattatcaaatgaataataaccattactatatctatttcctagatgaccaaaatagttcttgctgccatcagcgttttccaagaaagattcacgcaattgaacaccatttgataaaaagtattgcacttcgccatttagatgctgtaagccataaaccatatggccattattatcaaagtaataccagtttcctttggcatcttgaacaaagctgttcttggcttgataaccactagttgaatagaaagtcatcccattgccatcattaacaaaaccagtcgaagcttctttgttagtcatctgttttggcagataggtttgattccctttcagttcaaagtatttatcactagcattatctttaagaacataaccaacaccacggcctagaatatttgtcccattgaagtattttgctttccatgctgtgattttttcgcttggatcaatcttcttaccatttgaaatttgcgtgcggttaaagatactagggtacttagcagcgagttcactaaggaaagcaccgccatacttcgcttgataatccttaccattactcttagtgttggcagcatagagtgtatttttgatttcagagtctttgcgatactcaccataatcgttgacacgtgtagccgttacgacttctttgcccggaagattatagatttgatctggtacccaatccgcaataacctgaataccgcttttatgcagagctttaactgcattaatcatgtcttgctgagaaccgtatttgttattcttactcatagcaagatcataacgatcctcaaaggcataaccattttgaataatagagtctagaaaagaaccatcttcagaagagacatattgcggtgccatttcaaaggaagtgacaccccaagatttgaagagttggacattttgagcaatcttcttattagtatagtctgaatctttcgttacaaaatcttggaagtttgagaaaccttcgtaaatcaattgagaatcaagagcacttgatgattcgtagacttgaccagtagcatttgccttattgcttgctgctacacgaacatcttgattatcactagctcctactggaacccaaacggctaaataacctgatacttgcggattcaggtaaccttgaatgtcactagcatcaaagactaattctcctttatcattcgttttgcgataaagggatttagcagcggcatcagaagtgtagcttgtcaaaccatctttagttgttaagaggagcggacggtactcttgatttttatgcgcagcccccatattgacaattactttatcattttgattcaatttaaggctagggttattgctggtaatgacagccattccttgtgttttggttgcttcactgccttgatctgtagcttcattagctcctgtaccataacgaacagaagtcaaaacgcctgtataatcccaatccatatgacttttatcaccttcaacataggtgatcttcatgtcttgaccaccggcggcatatttaatacgtgcctttaataaagtatcaatagcatcataataaggggatttagtcgccatatattgaccgtcatcactgtacatatcaccataataaagacgtgtaatagaatctttattggacagcatcaaagcataggctgtcggaatattggattgtgtgtactttttcttagcctgacgcatgtcttcattgtagatcttaaaggcttgcttcaattcatccaaagtaaaggtcaaaccatctgttttgggattaatctgagctttaataattttagcaataaccgtttggacttcactgtcgtgagcgcggataaaaatatagttagccatacgttcactatttttaccttcagctgaacggttattcaagctatttgttatgacaggctcaagtccgctgcgaatttcatttttattgcttgcatctttttcaagaggacgcgtcaaagcatataaaagcgataggcgcagtttattatcaatcggtaattgtgcacccttagtatctttattgtattggggatcattatctgaccaagcttctaaaatggaaagatgattaatcgcatttttctcactcttatcaacaccataatgggctttcaaatagtccgaagcaatctgcagcaagtcggcattaacattatcaacggcatcaacacgaacgccgtcaaaattagcctcaggatcattagcgacaatagaaccataattcatcagataatgaagccagtttaattgttcagcttgaaccactggatttgaattatcaatatcattagctaggaggaagtcatagccaccagaagaattgtcttcaaaatattttggtttacccgtttgactggttggtgtgcggttcaaaagacgataattggaattagcataggctgtcttatcgctgttgctgtaaagcagagcaccgccttgcaagtgatctttttcaccagctgaagtatccgattctgtttgactattccaatttggttgcgttttaacaaaactattgataatatcacgcagccactgggtttgctgcgtttgagaaattttagtttcaatcttaacttgaacggtttgtgcagcaaggttgagactttcttggctgctgtctgctgtgtaattttcaccagttccaagtccttgctggttcatgtagttaagataagcaatttgcgtttgtttatctggccaccaagacattaaaagcggacgaagatcagactcagatgaagctgtccacgttttgccattctttaaaatatccttaggacgataccacgaatcagctgtgacatagttatcaatcgtttcaagactggtattttcaaaattgacaatttgattgtggggagtataatcgttgtttaattttgttaacccttgtttaaattgatactgagaagtgtccgttaaggcacctgtatttttatcgaagtagagtactttgttattaacggttagagcaaaatttttcttaggctgaccatcagaaccaatataataatatttgccatcaatttgtttcacatttggaatggccgctaagtcaacaggatttttattttcctgagctgctgtttgtctttgctttgttaattcagcttttgcctgtgttaaagcctgactggaagcagtagtctgtgcttcttctgcttgccttgtgcgctcttcagaagtttgtgcttcttctgatttcgtatttgttactgttttgtcatcagagttggcttgtgttgtaatattttgtgaaggagtttccttagtgatgctagtgcttgtatcagcaacgtttgcctgactttgggcctgcgtttgttctgtttgtgcttgcttagttttaggtgcatctgtttggttggattcagatgccgccttatcatcctcacttttctgagttaccactttatctgaggtctgctgttctgtttctgctgaaactgagcttcccagtgttgtggtgcccaaggtaatcaaaccagaagcgacagcaacggttacccagtgctttttaaccttgtgcattttgtaacgtcgtttggtttccataaaatatcctcctttatcagttcaacattataacctcataatgctacaaaagcgataacatatacgttacaaacccttttctttatttttctaatgtattaagtctaaaggatgaggagaattatttttagaaaggcagcattgattatcttttttaccatcacaacaaccgtcgtaaaataatttaaaagggctataaattacatcttttaacacagtttataaatacaataagctagcaacagtcatatttaaaggaatggtcaggagagacaaaacagttgtcaacaagaccagacgcgaaccatattcatattctccgccataaacctgactgaggagagccgtgtttaaagcagcaggtgaaataacagcaattgacagggctaattttacaggatccgaatgaatgggcaataaccagatcgttaaaatactgattaaggccgtaacaaacaagcgtaaaaaggcagtataatatgcgggccagtaaagaaaaacttctttaaattttactttatagaaataagaacccaagacaatggtggatagaggcgtatttaaatcagcaaaagcatcaatagcatctcttgctactagaggcagtttaaaaggctggataaaaagaaagaggccaatgactgttgctatcatagcaggattgactaaaatagagcgccagttgatcacagttttgtcttgagcaataaggtataagccataagtccattgcataatttgattggctacaacgaatcctgaaataaagaaaacagcttctttaccgccaactgcaaaagccaaaggagttcccatgaaaccaacgttagcaaaaagaacagcatatttatccgttgccctttctttagaaagcaaaaatgaaacaataacaatccgagtaataagcagaaaaaaagcagccccaatcatgctaaacaataaaatcatttttttccaagtaaatgcttgataaataaaagacgaaataaaaagactgggtgcaacaaaacgcgtcagcagtttagatagctgtaaagtaacctccttggttaaaatctgccgctgcgctaaaaataatcctgctagcatcagcaaaaataaaacgagtaacttttgaaaaactaaacctgcaattgccataatgatttcctttcctgctttctgctattatacacgagaaagcaaaaaacaagcaagggcttcttacttgtttttagtgcccatagtctatgaaaatcaatagacttgaaaaatactaattggttttagcgctaaactgactcatatacaaatcataatagaagcccttgtcagctaagagactttgatggttcccctgttcaataatttgaccatccttaaggacaaggatcttatcggcttcttggatagttgaaagacgatgagcaataacaaagctagtgcggccttccataagcttactcatagctttttgaatgagaagttccaaacgagtatcaactgaagaagtcgcttcatccagaatcagaattttgggatcagccagcagcgctcgtgctatggttaacaattgcttttgccccaaagaaatattattagattcttgattgacttccatattataaccgtctggaagggttcggataaaatgatcgacattagctgccttggccgcttcgacaatttcctcatcacttgcctgcaaatttccaaagcgcaaattgtctttgatcgtcccttcatataaccaagcatcttgaagaaccatcccaaattgtttccgatattcctgacgggaaaggttacggatatcatgattatctactgtaatcgctccttgggtaacatcataaaaacgcatcaaaagattgataagagttgtcttacccgccccggtcggaccaacaacagcaatcatctgacccggtttaacatctaaatcaaaatgtcgaattaaaggcttatcctcagtatattgaaaggcgacattatgaaaggtcacttgccctgtcaaatcatgttccagcttttccttgacttgattgacttcgtctgtttcatccaaaacctcaaaaatacgttctagagaagatttagcactttgaagaacacttgataattgtgtgatggtctgaataggctgattgatttgccaaatatattgaacaaaggcctgcatattaccaatagtcagtctccctgctaagacctgcaggccgccaactaatgcaacaatcaaataagctaagtctgagatagcattaagaactggcatcattattccagaaataaaactggctttaaagccgacatctcgtaaattttctgtgatagttcgaaaggtttcagcagatatttcttcacgtccatagagttttatgacattaaagcccgttaagttttcctgaacgaaactgttcatatcccctaaagcattagcctgttttttaaaataaggctgtgatttccttaaaataaaacgagaactgaaataagtcagcggaatacaaacaagaataatcgccgccaaggtcaaattaaggcagagtaccataaccacaacaaggataatcgttaaaaaggcattaataatttgcagaaagctctgctgcaaagcgttagagaccgtttcaacgtcattagtaaaacgtcctaacatatcaccaaattgatgtttatcaaaataggaaacgggaatcttattaatctttttacttaaatcatgacgcaaatcgtaaatacttttttgcactgcattagtcataaagtaattagaaccgtaagagccaatactatacagcaatccgcgtaaaaaataaagaaataaaatcatggtgatataactgatattaagatgagcgccttgaactccgcgagccatatcaattaggttagccgttaattctgtcattaccagtcctaaaataaaaggttcaaggacattcatgacactgctaagtatttttaagaaaatggccaaaaaaagtgaacctttataggtcttcaaataataccataagcgtaaaaaaacagttttctttttcatgagacctcctttactcttgcgttaaactttgctgattgagctgtgagttggcaatttcacgataaatggcattggacttcatgagttcatcatggctgccgcgaccaacaatttctccttcatccagtacaataatctggtcagcattcataatagttccgacacgttgggctacaatgagcactgttgaactgcctgtcacttctttcaaacgctgacgcaggagactatccgtcttataatctaaggctgaaaaggaatcatcaaaaatatagatatctggtttcttaacaactgcacgcgcaatagacaagcgctgcttctgtccccctgaaagattgctgccgccttctgctaagtggctatcaaatttctcagctcgactttcgatgaattctttagcttgtgcaatatcagcagctgaatgcagttcagccaaactagcatcccttttcccatacttaagattttctccaatggttccagtaaatagcagcgctttttgcggaataaaaccaattttctgacgcagagccttaagattatagtcacggacatccacaccatcaaccagaatccgacccaaagttacatcataaaaacggggaatcaaattgacaagcgacgactttcctgaacctgtactgccaataaaagcaatcgtttctcccggtctagctttaaaagaaatatcatgcaagacaggactttcggtctcaccgggataggcaaaggtcacattgtcaaattccaaatagcctttggatttagtctccttaatgccatttatattgggatcaatggaaataggcatagccattacctcttggatacgtttgctagatacagccattcgcggatacatagtgaaaatattagcaaatattaaaaaagaaaagagagcatgaaaactatactcaataaaagcaaccagatcaccaatcttgatagtcccttgcttaagcggatctaatgaaaaccagacaatagctactatcatgataataataatctgaacaaatagggcttctgtgagtccggttaatttaaatagtctgttagaagtcttttcataacctctgttttttaagtcaaagcgttcttcttgaaaattttcacgcgcaaaggcacgaataacacgtagacccgttaagttttcacgaacgtactgattaatcttgtcaagcgtattttgctgcttttcagacaaagggcgtgtttttgccgcaacataataaatcaccagtatcaaaaaaggaatagcaaatactacaatccaagccaaagatgggctagtcaccaaaaccataataacacttgagaccatcatcaagggggtaacaattcccatccgcaaggacatttctgcaaattgcataagtacaaaggcgtcactggtcatacgtgtaaccaaggaagagacaccaattttcttatattcgtgatgggagtactcttgcaatttatcatacatatcattgcgcatatcgcgaatcatggtcgtggttaatctgccagaagcataggctagggtaatacgcccgactattcctaaaagaacaatgataaacataataaaagcccaaaaataaagagcttgtttatcagccggtgtgatcccttgatcaatcattcgtgccagagctgtcggtaagcccaaattgacaacaacaaataaaagggcaccaagaatgtccaatagtaaccatttgggatatttttttaaataagaccaaatatatatcatcttatttcctttcttttataaattttttatcattcacacatcccatagcaatgtagttagcgtcatttgccaatggcttttctaaaaatataaactcaaaatgtttataaaccttaacagtctgagctagctgatcgaaacttttaagataaattatgtgaaaatcttcttactagcttcttcaaagatagactttaagagcatactggatagaccttggtcttaacagtcaatcatacaccaaataccatttttacagctcagcaacagccagaaaaactggagcaaatcctccagttccaacaatctgactataatctttcaagacaaaataaactactctaggaatagattgatagtagctagccatctaagtaggaatcaaaacaagccgttcccagaatagctaaagtctctttttccaaagaatggaaaataagcgcagctactgctgcattatttctccagttcgctcaagtattcataacgctcatatttttcaaggagctgctcattggcagtatctaaatcacgctgcaaaccagccagctgaccataatctgaagcatgttcctgcatggtcgcctcaatgttttcgattctttcctctaaagctgttatatcatcttcaatcgtcgcccattcttgcttttcaaaataagacatgcgtttacgtcctgacttttctttctcaacctttgctgcttcttttttgactaccatggcagaactgtctttttcaaacgctttctcatctaaataatcggtataattgccaaaaaattcacggatggcattatgttcaaaagcgaggattttattggctactttgtctagaaaataacggtcatgactaaccgtaatgacaggaccagaaaaatcctgcaagaaactctcaagaactgtcaaagtcgcaatatcaaggtcgttggtcggctcatctaagagcaagacattgggcttttcaattaggattttgagtaaataaagacgtttcttctcaccgcctgacaacttagaaataagtgttccgtgtgttgagcgcgggaagagaaattgctctaagagactagtcacactgcttatcccaacagctgttgtaacctcatctgccacttcctgcaaatagttaatcacacgcttgttttcgtccatatcattgatttgctgggagaaatagccaatacgaaccgtctcaccaatatccagctttccagaatttggctgcaagtcgccattcattaaatgtaaaagagttgattttccaaccccattttcgccaacaatgccaattcggtctttgttttgaatgagtaaattaaaatgtgtcaaaatcgttttatcgggataagcaaagtctacctgttcaaaattgataaccttttttccgatacgactggtttgaaaattaatttcaagatcagaagaagtatccataccagataagtctgattttaaattcttaaaacgattgatacgcgcttcttgttttgtcgcacgcgcctgtggctgcctacgcatccaagccagttcttgtttgtagagctgctttttcttatgtaaagctgccgcgtcgcgttcatcctgttctgcacgcaggcgcacataatcttgataattgccctgatattcaatcaaatgcgccctatccaattcaaaaatacggctggcaatactgtccaagaaatagcgatcatgcgtaataaaaagaaccgtttttttgctgttttttaaaaaattagccagccaagcaatggtatcaatatcaaggtgattggtcggctcatccagcaaaagcaagtctgcatcatttagtaaaacctgagctaattgcacgcgccgcttcaagccgcctgacaggttaccaaccttttgcgataaatcagaaatccctaatttagacaaaacagttttgacttcactttcaatagaccagacatctagagcatccatttctgccataaccttttccaattgctcctgattagcttcatcataattggccatgaacgattcataagtgtgaatgagctgcatttccttcaaatctgatgacaagactgtatcaagaattgtcttcgtctcattaaaaacaggttcttgcgttagataagccatcttatagtcgtttttagcagaaaaaggtgagttgtcgccatcaaatcctaatctaccagagataacatcaagaagagtggtctttccagtcccattgacaccaatgattccaatacgatccttatcatggataataaaagaaatattctgaaagacagtcttatcgccaactgttttgcttaaccgttcaacaataaaatcactcattcttagtcgatttcctttctgacaaaatccaaaattgcttgtcgttcattggctaaatttccagcaacaataaaactttcaatttggttcaagatttttcctaagtctggtcctggtttcaaatcaaagaccgccatcaaatcgccacccttaaccacaatttcatgcttgtcatgaatggttaacgcttcatccagctctttaatgtgctcaaaatcaactgctaaaccctgagcttgacgcaattcttcaacaagggttaacaaagttgcactatattggtaaacatcagtttttttgatttgtctatcctcgctcaatctataaatagctagaagtttttccaccgttttttgaaaatcattagaggttttccaactttttaagaaagatctaggattttcaacattcaaatacaacagtactgccgcccaagcttgttcagaggttgaaaaagtgaaatcctctggcaaatccgtcaacagctgctgccacttatccgcagtactttgcaataaaggcagataatcataagcttgactggcaattaaacaatttattcccttacgccaataaggagcccgtaagagcttgtcgaactcaataaaagagcgctctacagaaattttttccagcaagggcgcatgttctctcatagctatgaacgtttttttctcaatatcgaaatttaattgagcagcaaagcgcaaaccacgcataatacgcaaggcatcttcattgaaacgttcagcagcattgccgactgcccgtaaaatcttttgctccaagtccactagaccattaaatttatcaataatattagccttttcatcaagcgcaaaagcattgatagtaaagtcacgccgtttgagatcctcttctaaagaacgtacaaaagagacctgactgggtctgcgataatcaacataaagatcttcggtacgaaaagttgtcacttcatagtcatgaccattctctaaaaccaaaacagttccgtgttcaatgccaatatcaaccgtccgaggaaaaatttttttcgtctcttcaggataagaactgctggcaatgtcaacatcatgaataggatgccctaaaaggacatcacgaacactgccgccaacaaaataagcttcaaatcctgctgccttaattttctctaatactggtaaagcctcctgaaattcagaaggcaaatgttttaatctcatagtaaatgttccaaaccataaacgagctgctctcgctgtaccacttctttgattcctaaattaacaccactcataaaagaaatccgatcataagaatcatgacgcagcgtcaaaccttctccttgggcaccaaagatgacctcttggtgagcaacaagccccggcaaacgaacactatgaattctaaaaccatcaaattcagcaccgcgtgcaccaactagcgtttcttcttcatctgctgccccctgttttttataagcacgtgcttctcgaataagctcagctgttttaactgctgttccgcttggagcatcttttttcttatcatgatgcaattcaatgatttcaagatcagggaaatacttagaagccttagcagcaaattccatcagcaaaacagctccaatagcaaaatttggtgcaatcaaaccgcccaattttttatcagcagacaaagtcattaaatctgcaatctgctcttgcgtaaaacctgttgttcccacaactggacgaaaaccattttcaagtgcaaaatgtgtattttcataagcgactttagggatagtaaaatcaacccaaacctcagcatcaaggccaacaaggtcactcttatccgtaaagacaggcactccatcaatttctttttcagctgcaaaaggatccaaaagtgctgccaattcaagctcgctatcatttttaatcatatcaacagctgttgaccccattctgcctttaaaacctgcaacaataactttaatactcatttcctatctccttaaataattggtatagcaccaagtgcaatagctccctcacccagatgggttgcaataacaccattgaaaggaacaatggcaagattctttgtataaccatgatcaactaaacgcttctgcaaatcttctgccttacctctagcattggcatgaataatatagaccatataagacccatcagcagtaacctcatctataatagagattaaacgcttaatcgcttttttctcagttctaactttctcaaaaacttcaatcctgccatccgtaaaataaaggataggtttgatactcaaaagattacctaagagagccgaaccatttgacaaacggccgcctttaaccagatgattcagatcgtcaaccataataaaagcattggttttatcaatcatcacttgaagattgaccaaaatctgctcaaaagctatttcttccctgccccacttcaaagcctccattaccattaatcccataggactggaagtgattttagtatcaggaaaggcaatttcaagcttatcatgttcagcaattagatattgaatattttggtgaaatcccgaaatgccaccagacagaaaaagaccgataacatgggtataggcttcttcttccaagttggtcagtaaatcatctaactcagccaaattaggctggctcgtcttgggtaattccttggaagcagccatcttagtatagaattcatcaagagatagatttttaccttcaatatatgtctttccatcaatagtaatatcaatatcaaggataaaaagatcttctctttgaacaaagtcttgaggaaggtagactgatgaatcagtaattacagctaatttcatcttttttagaactccaagctaacgccttctttatcaagcgcaatttcagtcacttcataggtcatgcgttttaaaatatcaagcagaggcgccgctaaagtcgcaacttcctcttgtgaaaattcacttggctgattaaccaaacggtctttaatcttaaccatttgtgaaagaacaccgcttagaacaaactcatcacggacaatcatgaattgcaaaacggccacaacagtcgtttcatttaactcttcatttttttcaactaattgaaaagtcacttcaacatctgtttcaggtgtcccgttctctttttcccattctaaatttctggcatcataatgatattggttaacaaattccttttgacgtacaatttccattgttatctccttgttttacattaccactcattatagcataattaagtgtaaagtgaaagaagaccccgctagaatttctttagaaaaccagctgtgcaatctccttaatcaccaatcttctttcttgcaaatagcaataatcatataaaaaacaaagaatacttccactattaataaaatacaaaaataagaaaaacctgtaaaaatgagcaaagcagcactaactccgatgacaaatagactaataagcgctgtcacaatggttgcaaagccctgtttaacaacttccatttcattttcccattgaaaattgggatgctgtagattgatatataaacctacaagagaaataaagcaactattaaccactaaaaagaaaatggcttgtcctgctatccagagatgcaagggaaaagaatagatgagactgacggaagccagtatcaagcccggcaaaagcaagagcatattgagagaaaacttaataaaactgagctgagcgatggaaatcggaagggacttgattagccaaactctctttccttctatggaaaagctgcaagaagttgttgttgttagactggagcaaacaataaagaccagcaaataaagttgcggttttgcgatgatgatcgtcagattaggcaaagagactcccttcattatattcagtccttttaccatggggagaaatccgataataatcaacaaaaacggagcaagaatggtattgctgacataggtaaaagaagaaagataacgactaacttcattgcgaaaaagagcggttagtttcgatcttgtctgtagactgtaagagtgcttcttctcatttttcctactggcaagcaagtcagatagataatcgtattgttttaccaaaaagaaaaggactattgctgttatcattagagtcacaatgactagaacaaggataaagaaaagctggtctcgactgatattttccaagagggaaaaaggaaggatagaaacatggataagtcccaacttagcgttccccaatcctgtctggacataactaaaaataagaggaaaggctgtcagcgagaaaagcaagagagattctatgaaggaacttttgaggctcagtgacctcaaaagcattttaattagaatagctaaaatcagcgggaaaataaaagacaaggcaggaagaatcagagaaattaaaaggacgagccctagattaatcaaaggaaaaggagataagaaatataaaacgatctgagtaggcagtaaaatgagaagggacaaagcaagccttaagatgtattgagagataaaattagccaacttagcctgccaagacaaaagaggaaggctaaagataaagtccctatcactgctttttatcaaattggagaaacccgtcaaaactgaccaaaagctcagcatccaaaagagtaaacctgttgcataagacatcacttgagtaagttcctgctccgctttcatctgcagcggtaacaagagaaaatagctcaaaagcaatagaagagctattgtataaccactgattgttagtaaggcatgagctcggatagaggaatcagaatctcttaacttagataaccccaagcgatttttatacctgagaattaatagatagattaaattagtttttggcatgtgtcaccctcctaaagatagcactgagtgtctgctctttagtgaccgaactcatgctgtcactgattttaacctgtcccttatcaatgagaacaagcttattgcaaagtttttcagctacctccaaaacatgggttgaatagataataatagcacccgctgctgctctttttctcagctcattgactaaaaaataagtggcattaggatccaagccaacaaaaggctcatctaaaacaatcaaggcaggattatgcagaaaaagagaaatgagcaccagacgctgcttcataccatgtgaataagtggaaatcaaacgagatagatcctcctccaaatccaactctttggctaaatatttcaccctctttacaaatgactcttgcggtaggctatagatagaagcaatgaaattcaaaaattcatagcctcgtagattttcataaagatcaggattatccggcgcatagcccaaattctgcttaaaagactgaggatttttcgaaagatcaatgccatccaataaaatttgtccgctatcaaaagcataaatacccacaatagatttgagggaagtggatttacctgctccattggaaccgataaaagcacagatatctcctgcttccaaagtcaaatttaaatcttgaatgcctttattggatcctttataaatctttcttaaatgattgatttccaacataatatctcctttcaaagataactgacaaaatgtcagtcacaaacctaaatcaaaccgatgatatcatcggctaattaaaataaattaacttgcaaagtacaattgagcaaatgctcaaaagtaaaccaataatcctctcccttctttttatccttgagggttgtcagctcattagcagtgaaggtataggcagtcatgaggatacgagccaaagcctgtgggtgagacagagctaagagaccttcttcattgccttgctctaggatatgagccaaatagttacttgagagatcaataatctcatgagccagacggtccattagataacgattttgttctagatcgacaatctcttgtaagcctgcattctccttagtatgatcggttgatccaatttgtgtcgcttcaaagaaggtgcgcagtttgtccttagcagtcagcttcttatcttgactaatcttggccaaacgctggatgacaggttgagaatatttttcaattaaacagtagagaatatcttctttatttttaaaatgataatagagcagaccacgcgaaatcttgactttgtcaataatatcctgtgtccttgtctcaaggtagcccttctccataaaaatctgcagtgctgcttccatgatttcttgtcggcgaacctcaggcgctttaacatctcgcatagacaagcctcctaattacttttatcagtattatatagcgcgactgacaatttgtcaattacgaaattaaaataaggagcacctctaaaaagtgctcctcacttcaaattttaaacccacatttttcaactaattctttaaaatttagtttgctaaaatcacttaaaccaaaaagagcaggcttcctgctataagaccagtgatatagcccactacaacatctttggggtaatgaacaccgcctagaacacgacaaaaggctagtatggcggataagattaataaaaagattccagcccaagtagtcacacgtagaacacaaacactaatcaccactgccgaaaagacatgacggctgggcatggactgtcccttagcgtccttaatgattaacggactgatcgtccacctttcataaggtcttggctgatttaatatctttctaagtaatgacaataatataaaggatgttcccggaatgaaaacaaaaggtattaaagccatcccattctttcgagtccaaaaaaggtaaagtaaaagtatcagataaataaagggcattattctggttattacagaattgactgcttttacaaaataaagccatttacttcttgttttgattggctttgtcagtttctcataaaattctgcgtaatttttcatcttatctctatgtaccttcttaaagcacaaatctttcatgggttttagaacttattcgttttttgattgaatcagttatagttattatagcatttctaagcttgtaagagaaaaagcgactgtctctcaaaattaaaaaaagggcattttagattttctgatggtaagtgataggaaaataatagcaatgaaaaacaaataaaaacagtaccgctttttaaatggtactgtcacttgtctttttattttgacgtttcatttttcctcagcgcatacgaatctgcatatagtttaaaggctttagctgctaaggatttgacccgtttatacttaccgtttgtgataaacaaaaccatgacctgtttggttttaggatttgaataagcaaaacaagagtaagtatcaaaaccgccaccatttgcatgcagcatcttttggctgatatagaggccgccataatagctcttagaagtcattttcatagaacgttggtattcgctgacaggaacaaattgatcattaataaaagccatcataaatttccaataatccactggcctagaagcataatcaccagctccaaaggtagatgtcacttcttttgacagcttatcccaagtcgtactttgatccatcactgacaaggcagctaacttggacttatcttttatttgaatatactttttaaaatgccaacccttaccagctgttaagaagtgttgacgaacataagtcgcataattttgaccgctaatttgactgataatgccagctagcaaagcataattaatgttagcatacttccatttttttcgataagttacgcgataattggtcaatgaaaaatccaattgctgctcttgagttgtcagcacttgctgaggaacttcttttcgatctgccaaaccgcttgtgtgggtaagtaaattttgtatcgtgatattttcactattttcaatttgaggataatatttgcttaaaggtgtgtttaaagacagttttcctttatcaattaattgttggatagccacccctgttatcaatttttgtaaagaagcaagaggaaaataatccttaattgaaacaggactgccatctaccttgctttgatttgaaaatacttgagccttaccatctggccccgtcacaatcatgatcccatttaattgatttgtttttaaaaatcgctttaaaatgagcgaatcagggtttacagcaactgtatttgaatcaatccgttcagtctcgataaatttatagaaagcagcaaaaaatgcgatgagaaagacaagaaatcgcatgctaaattttctttctcccacaaaataccctcctattcctctaggtactctctattatacctcatttttgctttaatttcataaaaaataagtattcagaataaataaagtctagctagagattttccataggcaaagtttttagaaattagatttccttaggttacagctgttcatatatgttttagccatttcaattaaaaactgcaaattccaagaccccactattcataaacttgtttctaactattcctactgctttttcaaatgaaactctgtcattaaaactcagtctctgtcatcataaccctttggatagctggaatgccatgcccaagcggaggcaatgattttttcaatgtcatcaaattgcggtttccagccaagcacctcacgtgctttttctgaagatgcaatcaaagtatctggatctcccgaacggcgagctgctttttctgcagggattttctgtcccgtaactttacgagcggcttctaaaatttgaagatttgaaaatcctgttgatgatcccaagttaaaggccgttgatggattgccttggcgcagatagttaagagcaagcaggtgagcatccgccaaatcaaaagggtgtacataatcgcgcacattggtaccatctggcgtgttataatcatcaccaaaaatcatgattttctcacgcacgccttgagcaacctgcaaaatgattggcagtagatgtgtttcaggactgtgatcttcaccgattgagccatctggttttgcaccagccacattgaaatagcgaagtggcacaaacttgataccgtaggcccggtcagaccatttcataatggtttccatcatgagtttactctcaccgtatggattaatcggacgctgcggtgttgtttccttgattggaatttcatcaggaataccataggttgctgctgttgatgaaaagacgatatatttgacaccaaattcactcatgacttccaagagtttaatcatgcctgcggtgttgttgtcaaaatacttgaggggctttttcatggactctgcaaccaaagaataagctgcaaagtgaataacggcatccacatcaggattttctctaaaaaccatactcataaactctcgatctgctaaatcaccttgataaaacttagcagctgggtgtactgctgcacggtgacccgtcaccaaactatcaacgacaacaacctcttcctcacctttttcaataagacggtcaaccatgtgtgaaccaatataaccagccccacctaaaactaaaatagccataattaagataccaagcccgtaaacgacagagcaaaaaaggaaacttgacgcagacacctgcatctaaaaaaggttgtcttttctgcacagtcgctagggcgggttcaattctaaccaacaaagctagaaccaacccttcctttcttttttacttcactccaatactctctacaaaccgcatgaaagctgcttgcccctgtctattacgtttgtagacacctgcgtcttccaagacacggacaaaggttctcccaacagcttgtttgacaacttctgaaacggtttctgaactcgtttctggatgactggccttaatggcatcagcccagtctttgtggtaatcggccatttcattatactggtttaacacgtatttttcaacttctgccagctcttttttcagtcttggcggtaaaatggctaagcccataacctcaatcagcccgatattttctttcttaatatgctgcacatcaacatgaggatgataaactccgtcaggatactctgctgtcgtatgattgtcacgtaaaacaatatccagctcaaattgtccatcgcgttttcgagcaatcggtgtcacagtgtgatgcggtgtatcacctgtaaatgcaagaatgttcatcgtatcatcagaatagttacgccaagccagacgaatgatttcagccaattccaccaagcgagacttgtttgctccacgcagtctgataactgacataggccacttgacaatacctgctgtcacatctggaaagtctttgaaatgaaacacactatccaactctgctatttccataggaaaaatgtgacggccgccttgataatgattgtgacttaagatagagccaccgacaataggcaaatctgagttagaacccgcaaaataacccgggaagatgtctacaatgtcaaggagctgtctaaaagtgttctggctaatcaccataggtacatgctcagtgttgagaaaaatgcagtgctcgttgaaataagcgtaaggagaatactggaaaccccatttctcattacccaaattcatacggataatgcgatggttggcacgagcaggataattaatcctaccctgatagccttcattttccatgcaaagttggcacttgggataattggaagtcttagctaacttagctgctgcaatagctttaggatccttttcaggttttgacaaattgatagtaatgtcaatatccccataaactgatgacgttgtgaaagcaatatttttagcaatagcggtcactttaatatagtcgttacgcttactgagttcatagaaatctttgatagctttctgaggagattttgcataagtatcccagaaagctttattgacctgacttggaattggcgtgatgaagttcattaactccgctcccaagcaatctttctcttcagctaagtcgccaactttaccgttcacaacagccaagtcaaccaattcatccgtaagagcaatgaggttgctttggtttgtatcctgctgagcattatcttcaccaaccaaagcaagaatacgattgctaaggtaggtagcatccaactcagcatagtcactattttcaataattttactaacaaaagtatctagtaatgctgtcatcgttttatttccttgagagaacacgactgccgcctgcgatttctgcgatataaaaggctggcgcgtaacctactgtttcagtgtaaatgcgaccgacattttcttttaaggctgcaaccttatctttggcaacaatagcaatgccacagccgccaaaaccagctcctgtcatacgagcgcccagaacaccttcttgttcccaagcggtatgagccagcgtgtcaagttcaatccctgttacttcatagtcatgttccagagaaacatgcgaggcattgatcaatcgtccaaatttctccaaatcaccagctgcaagggctttcttagctttcagagttctttgattttcagaaactgcatggcgagcgcgtttgatacgcttagcatccttgatgagataagcatattcgtcaaaagtttcttcatccaattcaccaagagacttgatgtcaagaagaacattcaattcttcgactgctttttcacattccgtacggcgctcattatatttcgagtcagccaactcacggcgtttgttggtattcataataacaataacattgtcaccaaggtcaagcggtacaagatcatattccaaagtcttcgtatcaagataaatagccttcttttcagctcccataccaatagcaaattgatccatgattcctgaattaacaccgataaagtcattttcagttcttttcccaatttttactaaatcaagacgatcaagtttaagatcaaacaactcttcagccataatcccaatcaacaattcaagagatgaagatgaagatagcccagaaccatttggaatatttccaaaaacatagacatccataccagtgtcaatcgagtgccctgcttcttgcaagtatttgatgacgcctttaggataattcgtccaactatccttcttattaaatataagatgatcaagactgatttcaataataccaagttcttcaaagttagcggagtaaaagcggagtaatttatcatcacgtttacgagctgcaccgtatgttcccaaggtgattgctgcgggaaagacacgaccgccattataatcggtatgctctccaataagattgatacgtcccggtgagaaaaaagtagcgtctgcttctcttccaaaaacgtgagtaaaggcttggtttaattcttgttttttcataagaatcctttctaacttctgattttacaagtctattttataatcttagaaatctgaggtcaatatttttactaaaattttactaaatttattttctttttcctttacttttgttatactgaaatgagaagaaaggatgataatggctacattaaaagacattgcaaaattagcaaaagtttctcaggcaacggtttccagagtattgaacaaagatgaaaccttatctgtcagtcaaaagaccaagcatcgtattttaacggttgctgatgagcttggttatcagaagcatttaaaaaccactaattctcctcaggtcagacaaaaaattgctattgtgcaatggtacagtcagcaggaagaactcaacgatctttattactattctattcgtatcggtattgaaaagcgtgctcaggaattggactatgatattgtccgttattttgataacgatatcagtaaagtgtctgcagatgtcgtcggtctcattgccatcggtaaattcagtacttatcaaattgcagagctggaaaaattatccgataaactaatttttgttgacagtgacactctcaacgctgggtatccttgcgtaatgactgactttgacaatgctgttgttaaagttttagattattttttagaccatggcttaaccaaaattggtatgattgctggcgaagaaaaaacgacagatggcagagaactgctcattgatcaacggtttcgtacctttcgaaattatgcctatgaacaagacatctacaatccaaactatatcttcattggggacttttcagcacagactggttatcatttgatgaaaaaggccatcaaagaactcaaggaaaacttaccacaagcattttttattgctaatgatagcttagccattggagtgcttcgtgctttgcaagaagcaaacattcctgtccccaatcgtgtcagtttgatttcttttaacgatacagccttgactaaacaggtcttcccagcactctccagcattactgtctttaccaaagaaatgggccgtactgctgttgatatcctcaacagacaaatccttaaccctgatattattccaagcatgaccagattggccactcagctgacattaagagaaagcagcatttaggaaacaagacacattgattcaaataaaatcatttgacagtatcaacaatgtcaaactgtcaaatagtcaatcagaatcgctttattacttgatacaaacattaaaaaaacaacaggccgtcactttttaagtggtatcgtctgttgtttttttattttatcctagtttatcttaatacaaaaagcatcccaaggttggagtttgtgattggcaagagtagcgctttcatctgtattgctaatgagagtttcttgtttgtcaacatcaatctctagaacttcttcctgatctgaaacattgaccactataagatacctttcttctcttacctttcgtaaataggcaaatactttgtccgctgtagggagcaattcaaaatcggcatctactagccaatcattttcttttcgaagctgaatgagttgttgataggtgtaaaagatagaattggaatttttcagagctgcttgaacattgatgtctttatagtttggattaactggcagccatgttttatccgctgttgaaaatccggcattttgagaagcatcccattgcataggtgttctggcattatcacggccaatcatacgaatactgtccatgatagtttccatagacttaccatttgtaaaagcttccttagcataattaagggattcaatatcatcaagttcatttaaatctttaaagggataattggtcatcccaatctcttcaccttgataaatataaggtgtcccacgcataaggtgaagaagaatagccagtgctttagcagacttctcacgatatttgcccgtatttccccagattgataaaacacgaggcaggtcatggttattccagaataacgaattccacccctgtcctaattccaactcagtctgccatttattaaagattgtttttaaagcaggaacattaagttccttcacataattccatttaggagcttctggtttatgctgaagaccaatatgttcaaattgaaaaaccatagagagttcgtgattgactggatttgaatattgcttcgcaatctcaggcgttgctccccaagtttcccccacagtcagcaagtcatgttgaccaaaactagcgacattcatctccttaagataagcatgcaattttggtccgttactgacaatatactgagcaggaattttcccaatcatatcaatgacgtccatccgaaagccgccaatacctttatcaatccagaaattcatcatatcataaatcttctgacgtaagtttgcgttttcccagtttagatctggctgcttcttactaaaaaaatgcaaataatattgaccggacttatcatcatactgccaagcagaaccaccgaaaatagattccaaatcatttggctggtcacaccaaatataataatcgcgttcagaactgtctggatgctcacgtgcttcaataaaccaagtatgttcatctgaggtatgattaaccactagatccataatgatttttatgccgcgcatttttgcctgcgtcagcaaattatccatatcagccatattgccaaaaatatccgcaattgcttcatagttcgcaatgtcatagccattgtcatccatggggctatcataaactggagatagccaaatagccataacccctaacttttgcaaataatccaatttactcgtaatgcctttgagatcaccaattccatcaccatttgtatccataaaagattttggataaatttgataaacagttgccttgtgccaccaatgtttttgcatcttatcaccacctttaatttattatgacatgttagtttctttagttctaataaagagactgagaaaatctaaaacaatttaagccgttttttatcgaatggctgcttccgtctctgcatcaaagaagtgacccttggcaacattaaaggtgagagagaccttttcacccggttcatggaaatctctagcatcgacacgtgctgcaaattctgtttggccaagtttaaggtaaagcatggtttcactgccaagcaattctgagacaaccacttctgcatcaactgtagcatctggataagtttcctgaactaaaagactgctggaaatatcctccggacgaataccaaaaattaagttcttattcttaaaacctttagactcaagcattttaagctgcccttctgtaacagcaatcgttaagccatccttactgaccagatgcccatctttgatagtaacatcaaagaagttcatggccggactgccgataaaaccagcaacgaatttattagcaggccggttataaagttcctgaggcgttcctacctgttccacgcggccaattgtacctgaaccatcctcattttttgttgaactcataataacaatacggtcagctaaggtcatggcttccgtttggtcatgggtaacataaatggtcgttgcaccgatacgacgatgaattttcgcaatctctgcccgcatagatacccgcaacttggcatctaaattggacaggggctcatccatcaaaaagaccttggcatcacgaacaattgcccgacccatagccacacgctgacgttgacctccggataaatcagctggtttacgttctaaaaattcggtcagaccaagaatttgtgcagcttccttgacacgcttatcaatagcttctttggaatagtgacgtagtttaagtccaaaagccatattatcataaacgctcatatgaggataaagcgcatagttttggaaaaccatagcaatatcgcgatctttgggggccttatcattgaccacttcaccgtcaattttaagttcgcccttggtaatatcctccaaaccagcaaccatccgaagggttgttgattttccgcagcctgaaggaccaacaaaaacgatgaattctttgttcttgatatccaagtcaaaatcttcaacagagtaatgactgctgttagggtattttttataaatgtgatttaaatttagttcaaccatagtctctctcctaattattcaaagcttattgtttgatcattttctgttactctgtatgtcatatcttggagattaatctctgctgttgcgatatgactgccatctttattttgacgttctatgacaatggtcgcttcatttggcgtttccacttcaatacggccatccaaatcaaaagctgctgactgattgcggtaagtaaagagatttaaaagtgccttgacaactggccgcttcacttccttagcaatttcttcactactataataatgacggttgatattgcggccttctttagtgctttccagtaattcaagatcattcttgccagctaaaaagccaacgtaataaacctgtggaatacctggagcaaaagcttgtatcaagcgggccaaaaagtatttttgatcatcatcaccaagtgctgaatagtaagttgaattaatttgatagatatccaagttattatattcggcagttgaatacttacgattgacattggcaccgaccttataaagctcattagaagtataggtaatttcttcgtcagtcaggatatccttaacatcaaccacaccaataccgtcatgtgtatcaagggtggtgaactgtttcatcggactcattttcagccatttggcaagacggtcaaccttgcccgaatataggctgtagagcgtcaccataggcagggcaaaatcataaacatagtaatcatggtctgcaattttaaattgaatagtatagtgttcatgaatttccggcaagatttccgcacccgatacagcagctatatcacgaactttatctagcagagtccagatttcaggttcaacaaagaaatcattcgtatctagctttttaacagcataagcaaaggcatccaaacgaatgagatcacagccgttggctgctaaattttcaatggtagagcgaataaaatccatagtcacttctttagtcacgtcaagatcaatctgttcctccccaaaagtgttccagagatgttcaacactgccatctgcaaattggatttcctgcttaggtgctcgatccttacgcttataaatcaggtccacatcttcttgtgtcgggcgatttttaggccaaaatttatcccaatttaaaaatagatctttataagcacttgcttcatgcttttcttggtaatctttataatatttagactgacgcgaaatatgattaatcatgaaatcaaacatgaggtaatatttttcacccaaacgtttgacatcatcccaatcgccaaaagcagagtcaacttcatggtaatcaatcggtgcaaagccacgatcacctgtggaaggaaagaatggcagcaaatggacaccgccaacagcatctccaaaataattctcaatattttcattcaattctttcaaatttttacccaaactgtctgcgtaagtaatcaacattgttttatttgtaattggcattttatctcctctaattaattttggtttataccagttcaacctaaaaataacagccacatctttagctcctacaacgcgagccagaagtaatcgttcttattgcggctggcaagctagtgggaagcttaggcagaccgccatagcggctggcgttagttgataaagagctgcttaagcggtcattatctatagctctcacttcacagctccattgctcataccagcaataatgtgtttttggaaaataagataaacaattgtaatggtaataataccaacaatgtaagaagcaaaactaggaccgtaatcattgaaatattgtccgctataattgtattggaaaagaggaagcgtccacatacttgaatccttattaagaatcagcaatggcaacataaagtcgttccagaaccaaagtgcattaataatcagagttgttgcgtgcattggttttaacatagggaaaatgattttacgataagttgtcaatttatccgcaccatcaatttcagctgcttcatctaaactatcaggtacacttagtttgatataacccacgtaaaggaagagtgtctgtggaatagcataagttaaatacagaataattaatccccacatattagccaggcctaatttactcatcataaccgtaataggaatcatgataacctggaaaggaacgaaaattcccagaatcaacaggctatacatgatattgaaagcttttcttctagacatgttacgcgcaatggaataagccgctgcagggataaagagcatgaccaccaaaacggataaaacagtaatcaccgttgaattccaaaaatagcctccaacaccatcagctaacaaacgtttgtaattatccaaggtgataggatttggaaaggcaaaaaaatgattcataatatccttagttttcttaaaagagctaaagacagtaaccatcagtgggatcaaaatcaggatgccaccaacagtcaaaagtacatatttccaaaaataatttattttttcttcttttttcatagcatcagtctcctctaaacttcaaacttcttagagagtttaatttgcagcacagaaacaattccaatgataatgaataaaatcaaagcaatagcattagcataaccatactgattactcttaaaggcatagttataaaccaaaaggcctaatgatgttgttgaattatttggaccgccacctgttaaggcaaagatttgatcaaaggccgtaagaccagcttttaaagccatgatgaaaaccatggaaatacttggcagtaagtagggcaactcgactgaccaaaaggtctgtttactgtcagcaccatcaatagctgctgcttcgacaatctctgatggaatactctgtaatcctgaaaggaaaagaataataggcatagcaacaccttgccacaaaagaacaaagattgaagcaataaccgccccgttcgctgttcccaacatacttgtttctaaaaatttaattcccaaagcactgccaactgctggcaaaccataattgaaaacctgtttaaaaatcaaagaaactgtcaaaccagataaaacagctggaaagaagaaccaggctctgaaaaaagtttttcctttgatcttagcattaagcgcacgtgcaatgataataccaaggacaatttcaccgacaatcaaggccagagtcaaaaccaaagtaaaaccaatagccttcataaatttcccatcagtcatcaaaatcttataattattaataccaacaaaatcaaaattataggtcagacctgtccaattagtaaagctataaaaagcaccctgaaacataggaaaataaaagaatacaacttgtaaaatgagcggtacgattaaaaatgtccaaccccagtatttatttaaaacttttctgatagtcatcccttatccctcctaatcaacgtctgctttcattggattaaagaaagcgttaagcccatcagctaaacctttagcattttttgtcattagataattggttgtggctgtaaagaaatcatcttcactattccaatgctgacctaaccacacatagtgtttatcagtaaaagctaatttagttaaaggttgcaaaggtgaattcttatcttctctgactccttttactgctactggtgaaccatcaacatcataatatttctgcatcgccctagcagtcgtcatgtatttaacaaatttttcagcttctttaagatgttttgttttagctgaaattgatagagctaaatctccggctccaactgttatgccatttccagtttttttgcccggaaaagcaaaggttccaatttcaaatttgggatcttgttgtttaatagctggcaaggcccacgaaccattaggtgtcataagagctttttcattagcaaatgccacaagagcatcattataagaagctcccttccaatttttctgctgattgccatcatctgctaaaagattgagccgaaccatatcttcttttaaaattttatcactggttttaatcgaatttggttgggaaaagcgaaggtatttattagcggcattagcactgccagtgactgaaatcaaggataactgatgataaccattcaaggtccaaccttctgttcccgctaaagcaaatggtgtttccttttttgctttgatttcttcaaccaatttaacaaactcatcccaagtttcaggaaccttcaaacctaattctttaaatttggtcttgttataataaattcctgaaacattagctgttaacgggacgctgtaaaccttttgattaactttatattcgttagcataatgattctttaaatggttcagataggctttacccgtcatattataaaaataacctgctttggaccattcttgaaagtccatattttgaggataaatattgataacatcgggcacatctcctgataagacacgcgttttgaggactgtaccagcatctggaacactagtcatcttgacatgaattttaggattttccctttcaaagtccttaattatctttttcaaggtagcgtccatttcttttttttggttaaaatactcaattgttactttatcatcctttgactgcgaagccttacttttgttgcatgcagctagtaagacgctcgtcagaccgacaatacctagtaatccaatttttttataccatttcataagtgtctccttctactttttaataaaatagtattgtttactcaaataatcaccttgcggcatatcaatggtcaatcccgcatacattaactccgcacctgaaaaggcttgtccagtttctataagaacataaatggcatctgcatctagtcctctcaactttacagttgtttccatcatctctatggttgattgaatacggacataggtaaccagtacctgattgtcataggtatattgcactgctacctcattaattccaacttcgggattaattagacggtaaagcttgccaaattgtacaacagaccttatctttttataatgtttaatctgattggcaacagcctttttttcatttttggttaagattgctaagtccaattcataacctaaatttcccatcatagcaacatgacctcgtgttgtaagaggggtatgacggttcatttgatggttaggaaccgctgaaacatgagctcccatagaaatagttgggtaaagataagaggaaccatactgtataggcagtcttgcaatagcatctgtattatcacttgaccacacttgaggaaaataacacatcatccccaaatcgttgcgaccgccacctcctgaacaggattcaaacaagaccttatcgtgttttgttgttaagtaagaaacaatatcatacaaccccagtatataagcatgcgactgcatttgcgtttccaagtaagttctgccattgccaatattggttatattgcgattgtagtcccatttaacataatcaatcgtattttctgtcagcagcttatcaagaacagttttgatataagcaactacatcgggattagctagattcaagaccaattgattgcgagaataagtatgctctcgctgatctgcctgaatgacccaatcaggatgagctctataaagtttgctgtcaactgataccatttctggttcaaaccaaaggccgaactgtaatcctctatcatgaatttccttgataaagctatcaagggaaccactaagtttttcttcattgacaaaccaatcaccaagtgagctattgtcatcaaaacgatgaccaaaccaaccatcgtcaagcacaaagagttcaatgccaagttttctggcttcatctgccagccccagcaattgactccgattaaaatcaaaatatgttgcctcccaattattgataaggataggacgttccttattagcaaaattcttaggaataatatgacgtttaataaaattatgactttcttgtgtcagatccgttaatcccttatcagtgtaggttatcaaagctacaggtgtctcaaaactctgattagcctgcaggtcccatgaaaaattatcatcatttattccgatgcctaagcgaacctcgtttaattgatttttttgaacaaaagcttgaaaatttccgctatagattaattgtaaagccaaagcctctccataaaactcattgctatcatgctctgttaaaattaaggaaggggtttgagcatgtcctgaagctcctcgattagagcctattttaaacagaccctgttcaatctggtggcgccgaagcgtcttctcgcgagcataagctccttgaaaagttatcacatcataatggctggcaggtaaatcaaacattgttgataaagcacgatgaagaataacaggcttatcagataaattttcaaatttgacaaaggttgaaatggtggcattatcatcataagccgtataatacagagtcatgcgcagttttgccaaatcatcttctaagataagagccaagctttgagcactctcactgctatgtggattaggcaaatctcttgccttgatcccccccttaataattttagccttcttaaatttaaaccgtgttaaatcattattatcatgttgaaggattagtgaaggcactctaaaatcaccaaaaccatgaacaccaaatatttgtctttgtgtatcataactataatttctattgtccgccactggattagctgaaaaagcatgatccttttcaaaaacagtattggaaaaatgataggcttcaatttttttacctagatgttttaaaagcaaatcaccatctctttcttcaataatcaatgatgagtctttggtgtgtatataaaaaaggttatctttaataacaatgcccatttgttctcccttcatattacccttattatacattttgtaaccgttttaaaaaataggtgtttgttgctaaaatatggtaaaatgtttcctaaagaaaggtaaagaaaatgaatattctaaatatctataatgaatttgatattaataatttcgatttaagcgttgatcactacggttcagaaaaatgtgataggggctattcctttggtccaactattcgagacaattatgtcattcatttcatccttgaaggtaaaggaaaacttaccataaatcaacacacccttgacttagcagcaggtgatatcttccttctccccaaagatatctcaaccttttatcaagcagatctccaaatgccttggagctatatctggattggctttagcggttcaaaagccgagaatattcttaagcagtcaagcctttttaaacgtttttattgtcattctggccgcagctccaagctcttctcacaaatgatgaccattattcaatttgccaacacccccttaacctctgtcaatgaattactaatggtaggtgaactttataagcttttagctgccctcattgaagaatttcctctatctcacttagaagagagcaatagctcaacaaaagcttatgttaaccaagtgaaaaaaataatacattcgcagtatggcagttcccttcgagttaatgatattgctaaaaaactgaatcttagtcgaagttatctctataaaatttttagaaaaagtacaaatctttccataaaagagtacatacttcaagtcagaatgaaaagaagtcagtatttgcttgaaaatcccaaattaagtattgctgaaatatccaattctgttggttttagcgattcacttgcatttagtaaagcctttaaaaattattttggaaaaagccccagtaaatttagaaaagaaatccaaaataattaagcaaatgagttttgcacaactattggtcttttttattagaaaggaacagttttgcaaacgtttgcgatacaaatttattgtagcactatttctaattttgtaaagtgatttcctagactaatagagccattccgcttactttttagtactaggcagacacaagtttgataaacaaactgccccaccaaacagaagttgagacaaacacacatgatagccataaaaatcatttttccccctccttttctttcattatgacgcaacctctaatcagcaaaaaaagagaactctatgaaaagaaccacttataatggacagtataaaaaagttatatactgttcttataaggaggttctttttatatggccaaaaaaggaagcaagttcactaagtattcatcagaattcaaattacaggtcgtaaaagattaccttagtgggaagagtggagggatgccttccattgtcaaaaaatatgggttaaaatcagataatcagggactaacttggacaaggaaataccgcgaaaacccagccctactcacacaagatttacgaggcactaagtccactggtcgtcctaaaacgagaaatctagatgagatgtcactagaagagcagaatgcttatctacacatggagaatgccatttaaagaccttaaggactctcctcagaaagtgagaagagaccatctttatcaagtcgttgatcggttaaagaatcgttaccctgtctcctctttatgttcctattttggtttcccaaggtcatcatactacctctggttaagcaatgggaaacctgaatataagcagtttgattcaaacctcgctcaaaaggttacagacctcttccatgatactcagaaaggttatcgcttcatctgttatcaactcttccgtaacccaaagactattttacgctatatgcgtattcttggtcatcactcacctattcgtaagaagaggtatcattcttgtactcaacgagagataactgaaaaggcaagacacgcccactacaacgtgcttgcccgaaactttaaagcagaacgccctccccagaaactaacaacggatgtcagctacgtttactacaactatgggaggatgttcctgagtgtcataaaagattgttatgacaattccattttagactatacgctatccgatttcaatgataacaagttagtttttgataatatagatcttgtatttaataatttctgggattcaactaaggtctgcattcttcattctgatcaaggatttcaatacaccaatcaacaatatcttcgaaaactagaccaatatggagtgaccatttctcattctggtaagggaaatggttacgataatgcagcctgtgagaatttcttttctcacttgaagagtgagtccttaagactatttccacctaaagacaaggaaacactcatctctcaaattagggaatacattaactggtataactaccacagaccacaagagaaattaaaaggtatgactcctatggaattcagggagtcatatcttactaaataatacgctttttatactgtctattttagatggggcttgacactaagttctctttttagcaacagttgctgtctttacttgaatataatcaattaattctactgtcaaatcataacgtaaaaaaggagtaatgagataaatgccattaaaatgagccagaactgcgtctatcaattttttactttcagctaaagctactttctgacaggtttctttatcatccttaaccgcttctaattttgccagaaaagattctgataaactgattcccggaacttcattatgtaagaaaacagcattattataagaagtgatcggcataataccaacaaaaaagggctgttcataaggtttagtaacttcacttaactcttgtatgactgtttcgctaaaaacaggctgtgtgataaaataatctgctccagctgcaaccttcttctcaattaaccttcctgttctgcttaagtttttaacattagggttaaaagctgcagcaacggtaaaatgggtcgcttttttaagactagcaccactgtaaccatgaccctgattgagttgcttaatcaaagacagcaatttgaaactggtagcgtcataaacactggtagctcctgggaaatctccaatttttgagggatctcctgtgatggcaagaatatgatcaaatcccaaaagatccatgcccaaaaggcgtgactgcagtccaatcatattatgatcgcgacaggacaaatgaagtaagaaaggtgttgcaatctcatcctttagcattgacgccatgctgagattacaaatacgcgttctagcaagagaattatctgctaaggtaatcgccgcaatacctttttcgtctaaggctttgacaccatcaacaaatttgtcaacggccaaggttttaggaggatcaatttcagcaataatggtgatcccttttttaactttgtcaaccagactttcttttttctccacttcataaatcaagtcttcttgactgatcaaaggtgtcgtcactttacgctcaattggtttaagtcctcgaataccacgttttatagctttgatatgttcaggagttgttccgcaacagccgccaatgaggcggaccccttcttcaacaaaaagtttagcacaatactcaaaatagtctgcattctggctaaagtggtaaggggtctcattatcatcactggaaaaagataacagactggcattaggataagctgataaataactctgcgcaaacagtggtacttgcttgaaagattggatcatatgataaggccccaaatggcagttcaaaccaacgatatcggctcccaacatcaccaagttactaaaagcttccactaaaggtcgaccattttcagtaattcccggttcatgaagggcaacattcgtaatgatcggcaagtctgttaaaggcctcaaggcctttaaagcagcctcaagttcttctatatcatagtaagtctctaagagcaaaccatcaatttgcttcgtttccaaaagaaaccgagcctgttctacagtctgagaaataatgtcttccaaggacagttcacaatgtttaaggccatgtgaagcacctattgttcctaaaacaaaggtattgtcaccagctgcctgacgggccagatgaacagctgcctgattgattgccttaacttctttatcgtgaccaaaactttttaaacgatgtcttttagcaccataagtattggtctgaatgatgtctgctccagctgcaatataagcttgatgaatagccaaaattcgctcgggatgactgatattataatattcatggcaggattctaaaccatctgcatagagaagagtccccatagctccatcagccactaaaatatctgtctttagtttatccagcaatctggacatggtcactcccccttcctttagtttcctaacttttgacgaacttccttagttgcagcaactaaaaccttcaaagcagcaatggtttctggctcttgacgcgtttttaaaccacaatcaggattaacccagaattgtgttggcgataattgacgcaaaggcctttcaatattagccaccacttcttctttagttggtacacgcggagagtgaatatcgtagacaccaagaccaatacccaatggataaacagctgtttcgaaggactcaataatatcaccatggctgcggctggtttcaattgaaataacatcagcatctaaggcgcgaatagcatcaataatttcatcaaatttagaataacacatgtgtgtatgaatctgtgtttcatccttaactgaagaggttgcaatgtgaaaggcatggactgcatcatctaaataggctttttgcttgctttttctcagcggcaaaccttcacgaagagccgcttcatcgacttgaatgatagcaataccagcattttccaatagtttaatttcatctttaatagccaagccaatttgattaaataactgatcgcgtggaatatctgttcgttcaaaagaccaattggtgatagtaattggacctgtcagcataccttttacaggacgatcagtcagactttgagcgtaaactgtttcttcaacggtgattggttcaagatgctgaacatctccgtaaataattggaggcttcacagcacgagaaccataagattggacccagccaaattttgttgttgtaaaaccggctaatttttgtccaaaaaattcaaccatgtcaacccgctcaaattcaccatgtaccaaaacgtcaagatccaaatcttcctgaatacgaatccagcgttcaatttcagcctgaataaattgtttatactctgcatcactgatatcaccacgcttccaagccagacgtgtccgtctgatttctcttgattgtgggaaagagccaatcgttgtcgttggcagcaaaggcaaatgcagcttctcttgctgaatatcacgacgtttagcaaagtcgctagggcgttttgtcgcaacacgacttagatcttcaagtttaacgtttctaaaatcagcagcctgaagagcatcaaaatgtgcaatatgtgaatcataagctggatcttctctaccatctaaatgttcagccaatcgtttgacttctgttaatttttcatctgcaaaagctaacccattgcgcaagacaggatctaaatctgtttcattcttagttgttacaggcacatgcaagagtgaacaagaaggctgaatagtaagggctgcagattgttcctcaatcgcctctaacaatgctgacgttttaacaaaatcagaactccagatattacgtccatcaataacgcctgcaaagatttctttgcctttaaaagcacccgtcttaatagcctcaagattttcctccaaaccataaacaaaatcaagaccaaaggcatctactggaagttgagacaaaacctgactatcaatcaaaccttcaaaataggtctgaaaaataaatttagcatcagggacttctttagcgaagtaagcataaactgctttagctgcttggagataatctttaccttcatctgttacaaagataggttcatctacttggatatagcttgcccctgcttttactaattccgtaaaaacttgcttgtagagcggcagcaaactcttaacagcagctgtaaaatcttcaacgcctgttgacagagccacataagtaatgggaccagtaataacaggcttagccttatctccaacaacttctctagcttccaaataaagatccaataaacgattattattgagttttggtcgttgttttgaccattcgggaacaatatagtgataattagtgttaaaccatttcttcattgaagaagcaacattttctttatttccacgagcaatagcaaaatataagtcgatatctattggctctttagcaaagcgtttaggaataatattaaattgcactgacaaatccaaaatatgatcataaagtgaaaaatcccccactggaatcaaatcaagacctgcattcaattgtttttttaaaaagtctaaacgcagttccttagcaccagcaaataaatcattcttgctaacttttcctgcccaataagcttcgattaattttttccattcacggttttctcctaaacgtggatagcccaagcttgaaacttttgtcatttcttcctcctcttagccttaagataaaaactgtattcatcttataactataacttctttttttattgtaattaaaataatactagataatccttattaaatcaatgtttcaagggtttttgtgtttttatgtatatgtatagttttaagctatatatgtagtatttgttatagttttcatctataacaaaaagaacctgaaatgtttttgaatacaagaaaactcctcttatcatttcaagtgactattgcttgtcactgtccactaataagaggagtaattttttttattaatattaatctaacaatatggcttgttattaaacgaaaattatcttactttacgaagacttccaaaaagaataccagcaatcactgctccaacagcaatataaagcaggtaaagcaaaggattgcttgtcaaagcaataacaaagatacccccatgaggcgccattaatttaataccgcttaaaccaaccaaggcaccagtaaccgctgaaccaacaatgaaacttggaatggcacgtgctgggtctcctgcaccaaatggaatggcaccttcagtaatgaaagaaaggcccataacaatatttgttaaaccagcatcatgttcttcttgagtgaatttatttttaaaaagaagagtcgcaacaaaaactgcaagcggcggtaccataccaccagccatgacactggccatgacaactgaaccacccttagcaagagctgctgctgttaaagtacttgttccaaaaacataggctgctttattaaaaggtccgcccatatcaatcgccatcataccaccaacaataagtcctaaaagaactgctgaaccacctgataagttgccgaggaaattatataaggctgtattgatagctgccattggaatgttgacaaaaagcatgaggaaaccagttaccaaaacaccaagcaaaggatagagaaggatggattttataccttcaagagaacgaggtacaaaggcaagggctttcttgaggacaagtatgacaccgcctgcaaggaaaccacctgcaagagcgccaaggaaaccagaaggtataccagttaaactagcttgactagccttttcaccaaattcaaagaaagcaaccttattgaaagcaagacctgttgttgccatactgccagctacaaaaccagctaccaaacctggcttttcagcaattgaataagcaatataagcagcaaagactggaatcataaagccaaaagcagcattaccgacttgattgaaaatagctgcaatttcatggtaattccccaaatgactaagagaagacttaggaacccccatgaattggtcaatcaagaatgacaaagcaatcatgataccgccaccgataacgaatggaagcatttgtgaaaccccactcatcaagtgtttatagaaggcacttccaagaccagctttttcacttgatgatgcttcactgctaagatcagagttgtcagcaacataggcttcagctttaccatcaagaataatattgattaattcttcaggttttttaattccctcagcaactggacgcgaaatcaaaggtttaccattaaaacgatccatttcaactgccttgtcagcagcgataataacacctttagcacgcttaatatcatcagcagtcaatttattgccaactcctgaggcaccgttggtttcaaccttgatgccaactcccatttcagcggcttgctttttcagcgcttcttctgccatataagtgtgagcaataccagttgtacaggctgtaacagcaacaagaaaatcgtgactatcagctactggagagacaggtgtcgcttctttcttttcttcttctgttgcattaaaaagattgataacgtcatcaggattagttacctgacgcaacttatcagcaaagccatcttttaaaaggtattgtgataattcagccaaagctgctaaatgcgtatcattagcgccatcaggagccgcaatcataaagaaaagatcaacaggttcaccatcaagagcctcgtaatcaacacctttatttgatttggcaaaaagaactgttgcttcctttacagccttattcttactgtgaggcatagcaataccatcaccaaggccagttgaagtctgagcttcacgattcatgatcccagccttaaaagtatcaaaatcagtaacgataccttgttcgactaacttagaaaccatctcatcaatagcagcttctttagttgttgcctgcaagtcaagcaacatgacatccttgttcagtaagtcctgaatcttcataatttttctacctctactttttcatatgtttcttttataaaatcaatactggctaaatcatctgaaaaagcggttgctgtaccgcaagccactccccatttgagagcttcaagaggattagctgacttaacaaattcaccagtaaaaccagcaaccattgaatcaccagcaccgacagaatttctgacctgtcccttaatcggtttagcaaaataagtcgcatctgatgttactaataaagcgccatctcctgccattgaaataatgacgttttgtgcgcctttagcaagaatttggcgggcatacttttcaacatcagtaataccgtttaagtttaccttgaaaatagcttcaagttcatgattatttggtttaaccaaaagcggttgatagtcaagagcatccaataaagtttgcccttcaaaatcgcaaacaatttgcgctcctgtttgtctcaccaacgggatcaagcgttcataaatttggtttcctaaattggacggtgcactgcctgcaaaaacaactgtatcgtcttgtgaaagttgctgtaagatgttctctaaagctaaaacttgttcttttgtaatgacagggcctgtaccattaatttcagtttcttgatcagccttaattttgacattaattctggtatcttgattaacatggacaaagttagtcttgattccttcagcaatcaatccttcctcaacaaacctaccagtaaaaccgccaataaaacctgtcgccgtattatcctgtcctaaacgcttaagaatacgactaacattaatccctttacctccaacaaatttatcgtcactatccatacgattgacactgccgatttttacactatcaatacgaacgataaaatcaatagaaggattaagggttaccgtataaatcatacttcaatcaccttcgtcttttttcttacttcctttaacagccgattatcggattggttggtgataatggtcaccgtttctagccgatcaactttaacaaatgatgtttgccctaattttgaagcatctgccaaagcataagttacttgcgcattgtcaataacagtctttttgatagcagcctcttcagtatcaggcgttgttaaaaaatgatgatcaataccattcataccgacaaaagccttatcaaaattcagctgactcaattgcataatggccaactgacctatgctcgcatctgttgagtttttgacataaccaccaataattatcgtattgatatttttttcaactaatttggccgcatgatgaatcgaattcgtcactacagtcaagccttctgcgtgtaattgatccaatagaagagcagttgttgtcccagcatcaacaaaaatcacatcaccattatcaatcagctctgctgctcttttaacaatagcttttttagcttgaacgtttttgatagatttttgaagattggtttcctcttcttgcaaaggacggtttttctcagctcccccatgtacacgatgaagttttttctcacttgctaactcatctaaatctcttcgaacggttgactcagatgtatcaaggacaccaacaagaaattctaaggttacaaaattctcttgtgctaacttttccatgataatctgcttacgttcagattttaaaataagagtcacctccttgttgaaatcgtttacatatgctattatatactctcctataataactgtcaagcaatttctaccaaattctaccaaaaattaacaaaaagaaaggaaagtcctttcttttattttatcaatgatgtggaatgaacgacacgattatcacgctcaggataaatgtatttgatggcttggttaaccgctgttggtgcctctccaaatcctgttgcaattaaatcaattttgccttcatattctgcagcatctccaatagcaaaaacccctgtctgactggtttcaaaaagaggagatacattaatacttgaacgcttataatcaatattccaacttttgaggtttttgttggaggttgaaaatccaaaactaacaataagcgaatcaagtgacaactctttggtttcttctgatttgaccttttgaatcacaagactggttgcttcatcaccttctccttttaactcaagcggtacgtaaggtgtcatgatattaacatgagaagttttcagaacttctacactatgttcatgagcgcgaaaggcatcacgacggtgtaccaatgtgacactttcagcaatcttatccagagcattagcccagtcaacagcagagtcgccgccaccacaaataacaacctttttaccagcaaatttgtctagtttgtgaacattgtaaaagagattatggtctgcataacgttcctcatcgtccaagcccaatcgacgcggcgcaaaggcaccatttccacaagcaataataatggctttcgaaaaatgattccctttatttgttgtaattgtaaaaatagcattctctttttcaaatgttttaacttcttcttttaaacaaatagtcgttttatccttaaagcgctccaattgttcaatcagattatctaccaaatctgctccagtaatagcaggaaaggctgggatatcataaatcaccttttctggatataaaatggctggttgaccaccaagctcagataaactttcaatcacttttacagaaataccacgcaaaccagcataaaaagctgtaaaaagaccaaccggtccgccaccgataacggttatatcataaatctctttttcagatgtcaatttttcttcctccataaataaattagttccattatagcacaattaaaagcaagcaaacaaaaaagagcaggaaacaagctagcaagtacacagtaagattagcttgatccctcactctttattttttccaaaagttgcttttcttcctgagtaaactgataatgctctagcagatcaggcctacgttcccatgtcttacgtaagctttgctctagacgccataagcgaatattttcatgatgtccagacaggagaacatcagggaccttcattcccctatattcataaggacgtgtatactgaggatattctaagagacctgacgaaaaactatcatcttgatgactcgcttctttaccgataacttctggaatcagcctgactgtcgcatcaataattgtcatagcagccaattcgccgcctgttaaaataaaatcccctaaagaaatctcatcagtcactaaagttttaatacgctcatcatatccttcatagtgaccgcagataaaaataagttcaccttcttgagccagatcttctgcataagactgattaaattgctggcctgctggatccaaaagtatgacacgcggttttttagcagcaattttatcaaaagtatcaaaaataggctgagcgcgcaaaagcatcccttgaccgccaccgtaaggttcatcatctacatggcgagccttctctgcattttcacgaaaattatgatagttaatttctaaaagcccttttgtctgtgccttaccaacaatcgaatgttccaaaggagcaaacatctctggaaagagagtcaaaatatcaattttcatcgtccaatccttctaaaacagtcacatcaatacggccatttggtacatcaacctttaaaataaccgaaggaatgtaaggcaaaagcagatctttttttcctttgcgtttaacaacccaaacatcattggcaccgggttgtaaaatttccttgacctgtccaatcaagatatcattctcataaacatcaagtccaatgatttcatgataatagaattcatcatcttctaaatctgccagatgatcttcagtaactttgagggtgaaatcacgatatttttcaacatcattgatatgatagagtcctttaaatttgacaatatcaaaatttttatgttttctgtggctggcaatctcaacagtcatggcaaagtgatcttttttatcaaaaagagccagctgacttccttttttaaagcgttcgtctgcaaaatcagtcacagataaaacacgaacttctcctcgaagtccttgcgtattgacaatctttccaacattaaaatacttcatgtcttctccaataaaaaattactgcttttattttaccatcttgtcctacaattcacaattctatagaaaaaagcagcaactaccgttactacttttcatcaatcacaagtctcacttttttaccttgagttggaaccgaatagacaatcgatcttatcgctgtgatggtgcgaccttttttaccgataattcggccaatatcactagaatctaagtcaagatgatactccaaaaactcaggtgtatcttcaatttttatggtaaaattatctggttgtgaaattaaaggtttcacaatagcgataatcagattttcaatggtatccataggcaagactttacttctttgagtatttagcttcgtggaatttttgcataattccagcttttgaaaggatgttacgaacagtatctgatggttgagcaccattgcctagccactcaagaatacgatcttctttgagagtcacttgattttcagttacaagcggattgtatgttccaaccgtttcgatgaagcgaccatcacgtggtgcacgtgaatctgcaacgttgatacgatagaaaggtttctttttagaacccatacgagtcaaacggatttttactgccattttttataagtctcttttctctttttttatttgaacatagccaaactatgaactacttctatattgtaacataaaaaatcagtctgtcaagtttttttcttgacagttaaaataagttgaattctaaatattaccatgttttcagtacctaacaaaagcactaaacggctcactataaaggtattaaacgacaagctttgacctttcaaattttggcaactctaagaaagaagagaataattgcttttttattcctatgagctgacaaacaattattttagttaacagtacctcaaaaaataacgtctagactgaaaaaacaatctaaacgccatttgagctataatgtaacatgcaagaatgaagatttcaatctgcaaatttcaatgactccctattcttttttattcatatcttaaggcatcaattggatttaatttacttgccttattagctggcagaagtccaaagactatcccaacaaaagcagagaaagcaatactaatgagaataacctgcagagaaattgctggaacaatatgctgagcttttaaagctggagtgatagctgttactcccatataagcaattccaagaccaattagtcctcccaaaatagttaaaacaatggattcaatcaaaaattgattcaaaattttaatacgagtagcacctaaagcctttcgtaaacctatttcacgcgtacgctcagtaacagataccagcataatattcataacaccaataccaccaactagaagggagatacctgcaataacaccaaaggcaatagtgtacatggaagccatctgattagcttgctttacaatattatccatattatagttttcatataaaccatctttagctccagatatcttggtgagagctgcacctgtttccttaccaattttattggcctgactaacatcattaatatggaaataaatttgatcattttctttcacaccaaattcgctggcaacttgagtattagtcataatggcattcccacccgaagtcgttccataagttgctgttccagcattaggatcttcataaacaccgacaaccagataactcttattagataaagtaatcaccttattgagagcagtttcattgtctccaaagagcttttttgctagattggcgtctaacataataatacggccaaatttatcatagtcgttactagtaaaggagcggcctgctattattttaaatttcttgatggataaataagtcctgttaattcctgttatattaacatttttagagctcttttcccgataagaaacggtcgctgttttactattcgtaatataataacctgacactcctttagtatcttgagcgatcttttctacccaagcctcctgaatatctggagctttcgcactgctgtcagaggcatcaacttgataataagggttcttttctgcttcttgttcagcctttgttttataataaacatttaaatttttttgttctttattgacttgatcactaatcccttttttaagaccttgacctagagccataatcatgacaaccgaagctacccctatgataatccctagcatcgtcagaaaggaacgcattttatgactaagaatagaagaaagagcaaatttccaattttccataaattccccctattctaattcagccatttgctggctgtcttctgtaatctcaccatcacggatgacaatttttcttttagcatagtcagcaatctcaggttcatgcgttaccataataatcgtttttccttcattattaagctcagtcaataattccattatttgattaccggtcttagtgtcaagagcacccgttggttcatcagcaagaataatagatggattattgactagggcacgagcaatagcaactctttgcttttgtccacctgataactctgaaggcaaatgcttcatccgttcagatagttctaccttatctaaaaactctttggctgtttttttgcgctgagaaggactgacacctgcataaatgagtggcagttccacattttgcagagcatctaatttagagagaaggaagaattgttgaaagacgaaaccaattttttgattgcgaacatgtgctaatttgctatcatttaatttttcaacactttgttgtgataaatgataggttcctgaactagggcgatctaaaaggccaataatattcattaaagttgactttcccgaaccagacggccccataatagctagaaaatctccttcattaactgttaaatcaattcctttgaggacctgcaattcttgatttccattatgataactttttgttacccctttaagatgaatgagttcttttctatcactcactgcactcacctcttttcattagccttactagaaggtttttcaatcttcttgccttcttttaaattcttatctggattagaaataatagtttgtcctttatcaagaccagatgaaatttcttgcgatttagcatcagcatttccaacagcaacctcttttttcaaaactttagaattcgttttatcataaacccagacatagtttttattgtcttttgtaaccagtgctgaattaggaataactagactcttattgccattgactacctctacagataccgtgaagccttgttttaagtctcctatatcacttgtcaaatcaactttatagttataagcggctgaatttgaagaagagccgcttccagatgaatcagccgcttgagactgactgctttgatcctgattaggataattagaaatataagaaatttttcctgaccatttcttattaccataaaccttagatttaatgctaacttcttggcccactttgatattagccaagtcatattcagttaaggtgccttggatttgtaatttaccttcactggtaatatgaacaagagctttgctggttttaccagagggatcaacatcattattaacttcagcaactgttcctgtcacctcactattaaccgaagtatcatctagagctttttgagccttattaacttcatcttgtgcattggcttgtgcatcatacaaatcttgcagctgctgatctgatgatacagagtttactggggtaatagcagcggcacttgaacttcccagcgcattcgtattattcatattatagccactattaaaagaattgctatttccactgccagaattactgctagaatttcctacgttggatccgctgtcataagaactatcttgtgatggcagcgtaccataagttttataatttgtaatttgacggttaaccttatctagattcctgactgcttgatcataagctgcttgcgcagtactattatcatactgaaccaattgttgaccagcagtaacttgatctcctgcagacaccataaccttaggattggttcccttgttactatcataatagacatactgttccgattcagacttaacagttcctgacagcaaagttgaagaggcaatcgttccttctttgactttgactgtttgataaccaacattatttgatgatgtttggcttatttgctgtaatctagcccaaataaggcctaatactatcaaaatagctgcaaaactaccgccaataatccagcctttcttctttctggtcattttctcttttctttttggcataaatcttctccctcctatttttctctttatcatacctcaaagtaaagtcaagagccttacattattaaagttaaaacttacaaaattgtaagttttaactttaataataaagaacaacgcttattgtcttaaggctataatacaaatatacagccttttatctcttttgtcaagtttttcttgtattttttatatgtcaattaatcagcaatcagcttatactgctcctcatttaaacaagatcgtttgtcatcttacttacatcaaaaaagatggatatctccatctttttattctgattatatagcttgtgtaataaaacctcggctttcaagaacccttaccatggcatctgctgtgtcaagcgcagtaaaaagtggtacaccatgttcaatggcagagctgcgaatagccgcaccatcttcatcaaaggtacgtttgttgccaactgtattaataatagcttgtactttaccagatcgaacataggcaggaatgtcattatcatcatcttcacccaatttattaacaaggactgcttctaaattgttttctgcaaagaatttagcggtaccttccgtggctaaaatactgtaaccaatatttgagaagcgacgtgctaacgccaatgcttcttctttagtatcatcagcaatagtaaaaatgacattaccaaaagcaggaaggtggaaataagacgcttcaaaagctttatacagcgctttttcaagggttgaatcagtccccatgacttcacctgtagatttcatctcaggtcctaaaagactgtcaaccttagctaacttggtgaaggaaaagactggagctttaacatgaacattttgactttctggataaagaccatccttatagccaagttcagtcagactgcttcctaaaatcaatttagtagcaatttgtgccattggtatatctgtcactttagataaaaacggtactgttcgactggcacgcggattaacttcaataacataaacggtttcgtctttaatgacaaactgaatattcatcatcccgatacagtttagtccgatagccaaacgttttgtataatctgcaatggttgcctgaacttcttttgaaagagtttgtggtggatagacagccatagaatctcctgagtggacaccggcacgctcaatatgttccataatgccgggaataagaacgtccttaccgtcagaaatggcatctacctcacattcactgccgactaaataagaatcaaccaagacaggatgatcaggactggcctttacagctgttcgcatgtaagagcgtaaatcgttttcattttcaacaatttccatagcacgtcccccaagaacgtaagacgggcgaacaagcactggaaaaccaattttacgagccgaagcgaccgcttcttcttcatttgttgctgtttgtcccggcggctgaggaatatttaaatcctttaaagcctgctcgaaaagatcacggtcttctgcacggtcaagatcagctacttgcgtacccagaattgtcacaccagcatgcgataatggttctgccaagttgatagctgtttgtccgccaaactgaacaatgacacctttaggttgctccaactcaattacattcataacatcttcaaaagttaacggttcaaaataaagtttatcagaaactgaaaaatctgttgaaacggtctcaggattagaattcataataatagcttcataacctgcgttttgaatggctttgacagaatgaactgtcgcataatcaaattcaactccctgtccgatacgaatcggacctgaacccaaaacaatgacggattctttttctgatttgatggactcattttcccattcgtaagtcgagtagaaataaggtgttgcagattcaaattcagccgcacaagtatcaaccatcttataaacaggaattatcttgttgtcaagacgaagcttgcgaacagcatctgctgtcatctgccagatatcagcaatttttcgatcagcaaaaccattgtgcttagcttctttgagaatagcaatatcaccaaccttagctgctaattctgtttcaatttcaaagatatgcaagagcttatcaagaaagaaaagatcaatttttgttaaatccgacagttcctcaatggaatacccacgacgaatggcttcagaaagatagaaaagacgatcatcttgagccttaacaattttggctaccaaagcgtcgtcactaacattgataagctctggcatctcattatggtaaacaccgatttcaagggaacggcaagctttgagaagactttcttcaatattacgcccaatagccatgacttcaccagtcgccttcatctgtgttccaagacgacgttcaccatgttcaaatttatcaaatggaaaacgcggaatcttagccactacatagtccaaagctggttcaaacatggcataagttgtccccgtaactggattaatcatctcatccagagttaaaccaacagcgattttggcagctaatttagcgatagggtagccagttgctttagaagctagagctgatgaacgtgagacacgtggattaacctcaatgacatagtatttaaagctatgcggatccagagccagctgtacattacaaccaccttcaatcttaagggcacgaataatttttaaactagcatcacgcagcatttgattttcgatatctgaaagtgtctgcgttggcgcaaaaacgatagaatcccctgtatgaataccaactggatcaaaattttccatgttacagacaactagagcattatctgcactgtctctcataacttcatattcaatttccttaaagccagcaatagaacgctcaatcagacattgcgttacaggtgacagtttgagaccattttcagcaatttcacgaagttctttctcatctgcacacataccgccgcctgtgccgccaagcgtaaatgccggacgaacaatgactggatagccaatcttagcagcaaatgcaacagcttcgtcaacgctattaacaatatcagattctggaataggctgttctaaatcttccatcaattgcttgaaaagatcgcgatcttcagcctgatcaatagcagacagcttggttcctaaaagttcaacacccaactcatcaagaatcccagctcttgataattccatcgccatattaagacctgtctgtccaccaagagttggcagtattgcatcgggacgttcttttcttaaaattcgagttacaaattcaatagtgataggttcaatatagaccttatctgcaatttctttatctgtcatgattgtcgctgggtttgaattgaccagaacgacactatagccttcttcttttaaagcaagacaggcttgggttcctgcataatcaaattcagcagcctgtccaatgataattggaccagaaccaattaccataatttttttaatatctgtacgtttaggcatttataagatattaagggcgttaagtagacatagcaaaaataggaaaccgtccgacgacgcttgcgtctaggatgtgtttacttttttgcaaagtccacagctcgtattcagttaagcaaatacgagaacttgcccttctcctttctttcattaatcgtctctctagacaacattaaatattacttgctagctttttccaattgaaaagcatcaattaattctaaaaattcatcaaagagataagaagcgtcatgtggtcccggcgcagcatctggatgatactgaacagagaaagcggggtagtatcgatgacgtacaccttcaattgatttatcattaatttcttcgtgcgtaataataagctcctctggtaaattatcacgcgaaacagcataaccatgattttgactggtaaaatcaatacgtcctgttgcaatttcacgcaccgcatgattaaaaccacgatgaccgaatttcatcttgtaggtactggcaccatttgccaaactaaaaagttgatgccccatacaaataccaaaaattggaattttaccttgtacaccgcgaatcatctctaaagcttccggaacatcttgaggatttcccggtccatttgacagcatgataccatctgggtttaaatttaaaatctcttgagccgtcgtattataaggaacaacagttacattacaattacgttttgaaaattcacgtaagatagaatgtttcagtccgaaatcaaccaaaacaatatttttcccaacacccggagctggataagcggttttagttgatacctgttcaatattatttgttggaagaacagtcgcacgtaattgatcttgtagatgatcaatagagtcaccctcattggccagagttgccttcattgttccatgatgacgaataattttggtcagtgctcgtgtatcaatcccagaaatacctggaatgttttttgatttcaaaaattcatccaaggtcatctgcttgcgccaattattagcccgacgtgcattttctgaaacgacaactcccttacaagtgggtttaatactttcataatcatcacgattaattccatagttgccaacaagcggataggtaaatgtcaaaatctgaccattgtaagactgatcagtgatagattcctgataacctgtcataccagtattaaagacaatctcaccggttacatcaaggtctgctccaaaagcctgtccttcaaaaattgttccatcttctaatattaaaagtctttttcccataattttacctttcagtaagatacaaagtattttcactcgctaaacaaggtttgtaaccaattgctctttaaggaaaatccttttttgaatgaagctgctagatttgtcattaaacaatgattatgaaactaggttttgcctcttaaaattgcctcaagaatggccattctaacaaaaacaccgtttttcatttgagcaacaatccgtgatttaggagcttcaaccaaactatcagcaatctccacatcacgattgacaggagctggatgcatgataatagcagagctttttaattgtttgtagcgttcttcggttaaaccgtaatgctgatgataagctttcttagaaaaactttcttttccatcgtgtcgttcatgttgcacacgtaaaagcatcataacatctatctgattaataatatcatcaatagcaacatatttgccataaacatcaaattctgaagaataccattctttgggacctgcaaaataaatttgagctcccaagcgttttagaatttgcatattggatttggctacccgagaatgggtaatatctcccgcaatagcaatcttaagattctcaaaggaagcaaactcatcgtaaatagtcattaaatccagcagacattggctaggatgctggccagaaccatcaccaccattaacaatcgacgtttggatggtacgactatcaattaattctttataataatcatcctgtgaatgacgcacaacacaaatatcaacccctaaggcactcattgttagaatcgtatcataaagtgtttctcccttattgactgaactggttttagcatcaaattcaatgacgtccagtcctaattttttctctgcaacctcaaaagatttatgcgttcttgttgacgcttcaaagaataagtttgctgcaaaatattgcctatccaatgaaaaagtcaccttcttttctttgaaggctagtcctcttttaattaaaccaagcacttcttcattggacaagatttccatactaaccaaatgctttagtgatacaacaccatctgtaactaccatattatcagtccttttctgggagaatttgataaagaattataccaagtaaggttgaaaaagcgacacctgtaatctgtaaaccctgaatctgcagcgtcaaaccaccaataccagaaactaagatgatactagcaatcagcagatttttcttattatcaaaatctgtcttattctcaataagaatttttaagccgctagaagcaatcacaccaaaaagagcaatagatatgccaccgataactggagtcggaatggattgcagtaaagctgatattttaccaataaaactcatcaagacagcaagaaaagctgctccagcaataacataaacagagaagattttattaagggccatgacaccaatattttcaccataagacgttacaggaggtgctcccaaaataccggcaacaacttgtgccaatccatcgccagtcaaagttttatcaagtcccggttttttgaagaaatcacgacctgttagactattgagaaccatgatatgaccaaaatgttctgtcattgttacaaaagcaatcggtgccatggttaaaatagctgatggataaagcttaaaaccatcattcaaaataggaagatgaatggtaggaacttgtatccaagaagccttagaaacacctgaaaaactgacaatttcctggcctgttaaaattccaacagctacagcaaataagtaaccaaaaatgaggccaaagagaataggcattaaaccaaacattcctttgccataaacattaaataagacgacagcaaacagcgttatcaaaccgatgaacacataagtcagatgataatgaccatctttggtcatgacatcactaacagcactgcctgctaggctaagaccgataaccataacaatggggccgactaccacgggcggcaatattttgtcaatccaagaattgccaatccatttaattaccaaagcaacaatgaagtaaaccaaaccaccagtaatggctccttgagctactgctgcaataccgtctgtcttcattaacgtttgcatggcaccaatataggcaaagctagagcccatataagcaggaattttatacttggttacactcaaatgaacaagtgttcctagaccacatgataagagagcaacagctggatcaataccaactaagattgggactaaaacagtcgaaccaaacatggcaaaaaggtgttgaaaagataaacccaacaacataccaaaacgaggtcgctcttgaacatcaagcttcaattcttgactcatagactatcctctttagcaagtaataaaacattgtccttatcatcaatttctaccatattgacaacaatctcttccgagctgctggttggaatatttttgccaacataatcagcgcgaataggcaactcacgatgacctctatcaaccaaaactgctaaacttacacgagctggacgaccaaggttgacaatattatcaatagccgcacgaatggtacgaccggtataaagaacatcatctaccaaaatcacatcacggttggtaatgtctacaggcatctcagttgtattttcttcgaccttgacatcatctcggaaagatttggtatcaagttctccaagcggaacatccaagccttcaatttgtttgagacgttcctgaatacgacgagcaatgaagacaccacgtgtcttaataccagccagaacaatattatcaagattcttatttctctcaataatctcataagtcatacgtgtgatagcacgcttcatagtgacaccgtcaacaatttctttcgttttcatagaatgcctttctgtacaaaaataagaaaaaatctcctcatacaaggagatttcacaaaatataagtacagtttttcctgcacttttttctttgtcgctccttgcctgcctcacgggacagtgttaaaggaatattcatttctactattataacacactgcctatatttttcaagaaccaaccgttttttctaaatttaaaaacttactctaaagtaaacaatcagccaataccaaataatttagataggacagtcgtcaagcctaaactataggcaagaattgaagctggcttgcccaacaaaataatgagagagaattgtttataggtcatactggttgttcctgctaaatagcaaagcaaatcatctggagcaattggcaaaaagatagcccaagcaaaatacttagcaaatttactgtcagaatttgtccaatgttcataattagctagagctttaggactgaaaaatgtctccaaagctggacggccaaaccgtctagcaatatgaaatcccaaaacagaaccgatacaaataccaatataattccagataaagccccaaaacggtccgaaaataacaacacccgccaaagttgaaacaccacctggtaaaatcggaatagccacttgaataatctgcaataacacaaaaattagaggactccaattgccataacggtgcatggcagcccgtaattttttaacatctgttaaatagcctctttgataaaggtagacagttaaaagaatggttgccaggattaccagccaagtaacaatgcgcaaaaacatgcggacatgtcttaattttctttctgtcttcaaaagatttgagttcttcataaatttattgtagcaaaaactaagaaaatatactgaaataaattgtaaaatcaaaaaagcttagaaaaaatcaccagcacagttataagaatctgctgatcatttcacattgctaaacatcaaaaaccgaatgaccttaatccaacacttacaaatgatgcaaatggtctaatacctcctgaaaaataactggtacttcagtagtaaattgcatcaattcaccagttttaggatgcgtaaatcctaaggttttagcatgtaaaaactgtccttgacctttcaatgttttcttgggagcatagagaggatcacctgcaactgggtgaccaatataggccatatgaacccgaatttgatgtgtcctgcctgtttctaacgtgagctccaccaaactatactggccaaagcgttctaaaactttaaagtgtgtcaccgcaggttttcctttggcagtcactgtctgtttcttacgatccttctcactgcggccaatcggtgcctcaataacaccacggtcatttggcaagttgccgtgtacaagggctatatactgacgcagtgactttttttccttcagttccttcgccaaagcctgatgtgcttgatcatttttagcaatcattagtaggcctgaagtatctttatcaatccgatggacaatacctggtctgataacaccattgatagacgaaagatcttttatatgaaaaagcagagcattgaccaaagtacctgaaggatgccccactgagggatgaacaaccatcccttgcggtttattgataacagcgacatcctcatcttcatagacgatttcaaggggaatattctgagccacacagtctaagacttcttcttgaggacgttcataatgaataatatctccctctttaacagcatattttgctttttgcgttttgccattcacccaaacaagaccagctttaatttgctcactcgcctgagaacgagacaagtccgtcaaatcagccaaggccttatctagacgcactcctgcttctttaatttcaatttccatttttttcttctttccataaggcaatgattagaagtgctacaccaaaacttaaataagaatccgctacattaaagatagcaaaatcaacaaaatcaagatgaatcatgtcaaccacataacctaagcgtaaacgatcaatgaaatttcctaaaccaccagaaatgattagaagcagactggccagtagccaaaaattctgcgtttgcatctgtttgattaaataataaaaagccactcctaaaacaataaaagttatcaccgtaaatagccactgctgattttctaaaatagagaaggctgctcctgtatttcgcaaataagttaggctaacaagattaggaataaaatcaacgattgttcctagacgaatatatttgacaacaaaaaacttgcttagttgatctaaggcaactaaaagcagtgctgttacagctagtactatttttcgcataagatctcctaaggcttataagtttcaaaataattgaacatgacattgataaatttgagagcacacgtggataagtttgtactattgcgtctgacataaaccatgcgattatccaatttatcatccaaaggaatgaccgtaataccattgacactgcgactatccaaaaaaccagaaccagttgcataggcgtctgtacgctctaaaatgccatttagagttgctcggtcggtcacattgtaaatgagagaactttcactagtgtctaccaaattttctgagtaataaaggtattcatccttttcttgggtaaatcgtactgtttctagcccatttaaatcatccatagtcaactgttttttttctgccagaggatgattctgacgcagataaatatgtgtttgaaaagaaatcatctctacaaattcaagccccaatttatccattttttgcaaaatacccttacggttttgctgattcatatagataatgccgatttcactgtgtccttgggcaacttcatctaaaatctgagcagttgtcgtttcaaaaatacgaaaatctttatacttgggatactgtttggaaaaggcagtcagcaaaggcggtaagaaatcatagtgctgactggcaacagagaattgattcttttcactatcagactgggcataacgcttctcaaaagaatcaaaacttttcacaacttctaatgatttttcgtaaaaaactaatccttgactggttaaaacagcacctgttgttgttcgggtaaaaatttgaaaaccgagttcttgctctagatccttgacagcgactgacaaactgggctgactgacaaaaagcttagaagcggcttcacgaaaggtaccgctgttagcaatggccactacataacgtaattgttgaatattcatatgattactttctttttaaattgctctttctattatacaaaaaaatcacacattgcgcgtgattcagattgaagaaaaagtcttcttttgaaattttcttttcaacttcaaacagtctggggactgtttgaaccaccaataggtggtaaattatcaagtggatgatttcaggcatccagagaattccatacctaaatcaagatacaaagggcgttaagcggataagagcaaaatagggagagtaggatgtgaaatcattaagattctaggaggattcctctttttgacacaatccgcagcctatgcttatttcagatttaagcctaaggtctcaaatcttctgagtacctaaaactttagtatttcaagcacttttatcacaacggaaagactcgtttgaatcttgctctttgcctcgtcaataaaggaaatattcttgaaatctgcagatcttaaaaacaggttttctacattccaatcacacattacgtatgattattacttatttattcttgattatttccagcaagccaaaataagtggttagaattccttgtccattttcttgctggcacttagccaataatctttgaccgataagatttcctaaaagagagccagttagaatagttaaaacaaactctttacttgtttaatgaacttttttatccaaccaatttagaagaaaattctttgctaggctaggagatagaatagcttccttggcttggtcaggatgaaaccagttagctgcttccacttcatggttcagttttaaatcgctggctttcttggcacggcagacaaagttcaccattaaaacttgatttttttcataaaaagagctagcattaaaagctattatctcaactgtcaaacaagtctcttctaacacctcgcgtttgacagcctcttctaatttttcgcctttattaacataacctgccactaagatatactgtctcatatggtactgctgaatcagaagaatcttttgcatttgctcatcatagacaatcattgatactgcaagatcatgctgaggaaaacgaaaagcctgacaattttcacagtaaggtacttgcccttcgtgttctaacattttttctactaattgcatcccacaatgctgacaaaattccatttaacaatcctttaatgcttttatctgctgaccagtcttatcaaaattcttcggtgatagccagttttcaaaccgctttttcagtttaggccaatcttgatcaataacagaaaaccagtccgtatcacgtgtccgccccttataaacaacatgcttacggaaagttccctcataagtaaaaccaagtcgcttagcagcattgccagaagactgatttagatgatcgcacttccattcataacgacgataacccagattctcaaaaacataattcataaccaagtattgtgcttctgttgcagcagatgttttttgcaaggcaggtgcataaatcacgcgccccatctcaagcacacgatttttgggatcaatgcgcataagcgaaaaagtacctaaaaccttatctgtctctttgtcacgaatggcaaaaaaataagggttttcggatttttcataatcttggagacgttcttgaacagcttcagcagtttcaaaaggctgatcaaacatgtaggtccaatcagacggaactgcattcttccaatagaaatcaataatgtcatttagatgttttctggcatcaatatgttccacactgcaatagcgaccttctaaaaacttcacatcaggcatttgaccaactgcaaaatgttccaaagtttctccaacttcttgctgatactgattaactggcataaagaacctctttctattgattattaatcattatagcataatgattaataatcgtttacgattgatcgataattgacgaacattatctatctaccttaaaaagaaaacctattaaatgaaataagatgatcagataatcttcaaatctccagattaaaaaatggaatcacaagaagattttcacaactaaaaaagaaaaaggagtgaaaatgatttcaactccttttagactgaagcctgtaaaatacagactgttcttattccctgtaagaaaaactttaaaaaatttcctatactcaaaaagtagtaacttttattttgcgattgggtagacagatacttgttttttatcgcgacctttacgttcgaaacgaacaacaccttcaaccttagcaaaaagggtatcatctccaccacgacctacgttagcacctgggtagatatgtgttccgcgttgacggtaaaggattgaaccacctgtaacagtttggccatcagctgctttagcaccaagacgtttgctttctgaatcacgtccgttagatgtagaaccgccaccttttttgtgggcgaaaagttgcaaattagcaagattcatttttaacataatgttgtgtcctctcttaaattattgggtcataatcttagctgttacaaattctggagaattttcagcaagattagttattcctagaagaaaagcttcaaataacaattgaactttctcatctgatttattggttatatacgataaatcaatcttcatataaccgccatcaaactcatccatttgtaaactaactgtacagtctgctaaaacttccaaagcattaaccaaattcattgataaagttgaaacagctgcgcatacgatatcaaagccgtactcaccagatccagcatgaccagtcagctcaacgctttccagtatgcccttacggcgaataaatgttgcttgaatcatatcagtttatcttaagcgttgatagctttgataacaactttggtataaggttgacggtgaccttgtttacggtgactaccttttttaggtttgtatttgtaagtaacaactttcttttgttttccttgtttttcaacagttccaacaacagtagctccttgaacaattggagtaccaacaacagttttgtcaccaccgacaagaacaacttgatcaaaggttacttctgctccagcttcaacatcaagtttttcaacatagattgcttgatcgacttcaactttaacttgttttccaccagttttgatgattgcgtatgtgctcatgatgcacctcctataagtttttgtttgaggaaattcctccgtgaagactcgcctaaatcgtgagctacgaaagctgcttaaaagcgattttcgtgcggttgcacaggatgtgcatatagtcaacttttatagtatagcatagtcacttaggtatttcaaggagtacagttaatttatttagcttttttctcttcagtaatcgaattaggaaaaacaatagccaaagaaacaaatagaacagtatacatcatagccgatggccaaatggtcaaacttaaaaacaatcctaaagttttcaaaaacatatcaagttttagccatcgactctttttgacagagaaagtttggatggcttctgccttttggttttccttaatatgcgaaagatcactctgcatccacaaatttgaacaagatattgctatcacaataataccataaaaggactgagcagctgaattattgaaatcacttgcaaccagattagtggcataaggaaaaaaagaagagaaaaacagcattaataaagactgccaaactattttattggaaatacttttaatatcatgccaattacgatgcaataaaacccacatggcccctaaccaaaagaaggaaatagtataggcaaagaaattcattcgtaactgccatagattttcccaagaaatagggtttggtttctttaattctaaaactaagattgtcatgataatagccagtatagcatctgtaaacgcagctaaacgttcctttgtcattgtaaacctctctcattatgtttcctactgtactgttattggcactaagcccagaaccgctcttttgactaatttttgaaaacgttctaaatcaatactctgttccgtagtcaatatctgatagcgctcctgcccctcgtaatagtaatgagatgtcagttggtatccattgcgctcataaaaggacagccgctgtcttctttgttcactatttggcgcatctttctcgacaggctctatcgttaaaataagcggttttcttccagcatattcacgaatctgtgctaatatcatactgccatatcctttggagcgaactgacccattaacagctaaaaaaaggataaacatctgctccttagattcaataatataagcaaaaccaacaaagcgttccttatcataataggcatagcaagtcgccagagagcgcaagctatttagcagcaagcaaaaataaggaaagcgctcacgaggtggaaaagctgaaagatataatcttttaacatcatgataagctttactaaaaaacttcactttttgctgagttaaagtcatcgattccctttcttatcaaccatatctttgctaccattttaaattcaccaattccttcatttctttataggctgtatcaaccttctctttcatggcactatctaatttatgacgatatttgccgccttcgataaaatcttctaaaatcaagactcggtaatccttatattcataaccttctgaacctgtttgccccttgccccaagaccagaccatggttggatgggctttaaccgttttaatatttgttttgccagctttcttttcaaaagtgacatccatgagcaagccacgttccgtccaataattttgtaaattctcataggactggttagaaataaaattgcccatggaataaatgataaacttcttctgtccgtcttgcttgacaacctctgatggttcagcaacatgaggatgtccaccaaaaatgacatccgctccccatttgatcattttatgatagagtgtcttttgttcctctgttggctcaagagcatactccgtccccatttgcggcatgacaatggtcacatcagcttttttctcagcacttttgagttctgcttttattttcttttcgtcaaggttagaaaggtggtcagcccgctcttcttctgttaaattgctttccatcccattgtaaccataagcatagcccaagatagcaattttaatgccgttgactttcttaattagaaaagattctttagcacgatcttctttgtaaataccaatcgtatctaatcctaagtcattaaaggtcttaaccgtatttaaagcacccgaaagctgagagtcaagaatatgattatgagccaaatcaacgacatcataacctgtatctttcattgattgagcagcttcagtcggggcattgaaaagaggataacctgctaaaggataatcagggctaatggttccttcaaaatcaccaatagccaaatcagcgctagaaatccaacttttaacatattcaaaataagggtcaaaatcataggaaccatcgttttttctggcactggtatagagaatatcatgataaagaatatcaccattagccacaactcttgctctttggactccgtttgatgatgtgcctatttgctttgtccttaaaaacaaatcatgaatgccagccagcaacaaacagaaaagaacgaaagctaaacaaattactatgattttcgtatctctcgtcttcttaatcatatggtcactcctatgcttattataacatttttaagataaggtttcattgaaagaaaaaacattgaaagatgtttttccaatgtttcttttatttatgattcatgaagaaaatgattaatatatgatttttcttgtttttacaataaatcttcgattaagacatcaacttcatcctgactttcttcctgcggtgttatttctgtaatgttgatgcccgctacagcacgcgcaaccaaaccttcaacatctaacctcgcttcatactgctccacattcttaattttaggattggttttaggccgatccggtgcaaaaatagtacaacaatcttcaaaaggctgaatcgaaatagcaaaagtatcaatcttctcagcaatatcaataatttccaatttatccatggtgaccacaggtcgaataacaggtgttgtcgtaacagcattaatagcttgcatagactctaatgtctgactggcaacctgtcccagactctcaccattgataataactaaaccactgcgctcttctcgaatccgatcggcaattcgcatcatgaaacgccgagttaaggtcattagataggcttcaggagcttttgtcttaatttcttcctgaatctctgtaaaaggcacttcaataaattgaatattgccgccaaatttagtcaatttacgtgtcaaatcctgtgcttttttcagagcaccggggctagtataaggcggactggcaaaatggactgcttcaatattaacgcctctttttagagcaagatagcccgccactggtgaatcaattcctcctgacagcatcagcatacccttacctgctgtaccaacaggcaaaccacccgctcctttaatattttcataagaaagataagctgcttcctcacgaatctctactttcaaattgacatctggatgcttcatctgcgctttgatatcaggcaaaacggcaaaaactgcactgcctaaaacctgattaagttcacgactgtctaattcaaactgatgatcacttcttttgctggaaattttaaatgtcaaaccttcatgatgaagttccaccataattgcttgaacagccttctctaaagcagggacacttttttcaaccttataggagggagagaaggcttgaatcccaaaaatttgtttaagggattctgctacagaaacatagtttgctccattaagatagatatgggcacgatcacgatccgcacgaatactgacttcaggataaatagacaaaacatgtttcatattgcgtttcaattgattgataaaacgcatacgatttttacctttcgttgacaattcaccataacgcaccataatttctgaatactgcatagtaaaaatacaaggtcattgaatcattagaatagaaaaaatcgaaacaagtcacctaaattagaaacgacttatctcttgtctaaatttctcagacctttttgccttcccttcttaccttactttttttgttttttcataaatttgtttgaaaatggttaaaaattgctccacctgactcatgtcattatcctcatcaagactaaggcgaacggctgtttgagcaagcttgctggaaattcccattgaaatgagggtgcccgcaggtttaccagccttggaggaacaagctgatgtcgttgaaatgtaaatatcatgttcttcaaaggcatgaaccaatacctcaccacgcactcctttgataccaaaagttaaaatattgggagcaaaatattccatttctgaaaaaagaataacatcatcataatgcgataggctatcaaaaagaattctcttcatagccaacagttgtttttgtcctattttggctttatcaagaacaattctcaaggctttggccgttgccgcaatccccgctacattttcggtggtgcttcgaaagccagcttcttgtccgccaccgttcaaaagaggagaaatcttcttcccagctttcttataaataaagccaacaccgcgaacagaatgaaatttatgaccagaaaaagtcgcaaagtcaacacgatcagtcaagtaatcatccgttgctatcttgccaattgcctgtacagcatctacatgaaaagaaatactagccttatcagctaaaagctttgaaattgctttaatcggttgaacagaaccaatctcattattaacagccatgatagaaactaaaatagtatcaggtcgcaatagttttgccaagacatcaactttgacaaaaccctttttgtcaacaggggcaaaatcaacctcaaagccctgagtttgcaaccatttagcagattcttttactgctggatgttcaatgtcagatacaataatatgtttaccgtaacgctgcttttcaaaggccagacctttaatgacccagttatctccttctgtaccgcctgaagtaaaaaagacttcatctgtcctttttcctaaaagctctgcaatttgctgacgagatgcctgcaaaatcctgcttgactgactacctaattgatgcaagctagaaggattgccaaaaattttagttgccacttcttcataggttttgattgcttccggataaggaagtgttgttgctgaattatcaaaataaatcatctttatcacctttttaatacaatagcaacattataccatatttcacaaaacttctttagagaatagcatcatttttatggcttttttagggaaaaagcgtataatattatcaaaggaggaatcatggcaaataactattctcgtcgtcaacaacccactaaaaaaacaaaggggacaagtcggaaacgtccgactgaacatatcaaaacaggtttttcagcactgcaaaagagtgttgctattatcgctggtattttagggattattaccgctttgattactattaataattatcgcaatagttcacacaatgataaaaaagattccacatctaaaaccactatcatcaaagaaaaagaagtggatgactcaaatagtaacaacaatgctgctaattctcaagctgaaaatgacagcaataacaataataattctgcagaatcaaatcaaaaccaaactgcaacaacagcaaatgacagtaacagcaattcggctaatcaaaatcaagccaatagccaatcacaagcaaataatcaacaaaatcaaaacaatgctaatgctggtcaataattttaaaaaggttgggacacttttttgtcccaaccttttttattgcataatgttagtttagcgcaggagttgattggaattgtccccctcatttttcaagttcaacccctaaacagtccactggattgttaaagtatcccttgctttgcaagtgatcgctccaatagtttagaaactgttgaaacttatctaatccactttgcaaaaaataaaatgacgacatcaaatcaccaattcattccgattgactgacttcgccttactctctttttaaattttcttttctgagtactttcagatatgctataatgatgacactattgtatcaaaggacaaacaatgaataaaacagaaacgctcaattggattcactcctttaaagccaagggacgacaagctgatttaaaacgcatgaattggctcttggaaaaattaggcaagccacaaactacatttcctgctattcacattgttggaaccaatggtaaaggatctacatgtagctatttacagcatattctgacagcatcaggctataaaacgggaagttttacttctccttacattactcgctttaatgaacgtattgccattgacgggaaggaaatttctgatcaggacttaaacaaggtcatttcgcttgtcaaacccattgttgaatcagtaaccgttgaaacccattatgaaaaagtcaccgaatttgaactcgtcacacttcttatgtttacctattttgcacaaatcaatcctgtagacattgccatcattgaagcaggaatcggtggacttaaggattcaacaaacgttttcaaagcattggcggttgtctgtccttcaataagttttgatcatcaagaaaaactgggcaatagtttagcacaaattgcccgccaaaaggtaggagtcttagatgaaaaggtcccctttatttttggccaaatgacttctgcagttaaacaagtgttttatgaagaaacccaattattaggctgcccaacttttgaatgcaataaagacttttcttttaaggaaaatggcaaagcttttgactttatttatcaagactttttgatatcagctattcacctaaaaatgttaggacaacatcaaaaagctaatgccagtcttgccattatgacgagtttaattctagctaaggtatttccaaatattaattccaaaataataaggactggtcttcaatccaccatctggcctggacgttgtgaactattacaagctaatttgctgcttgatggcgcccacaatatagatgctattacaaagctcattcaagtgctaaaagacagctttggagataaaaccattcatattctctttgccgggctcaaacgtaaaccaatcgaaaaaatgttagcacaattagctgaatttgatctcagtgttacgagctttgatttttttgaagccctgcctttagaaaattacccacttagctatccaagagttgacaattggaaaaattggataactcaggcaacagcccattcagatcatctttatgttgtaacaggatctttctacttcatttcccaagttcgtaatcacctaatcgaaaagacaaggctccaatgaaccttgtcttttatatatatcagcgcatagtgacaaactcttctgaacctgttgggtgaatggcaacggtattgtcaaaatcagccttagttgctcccattttgatagcagccgcaaaaccttgaatcatctcatcaacaccataaccaataccatgtagaccaacaatcttttcatcctcacctactgttaccaacttcatcttgcaagattgacggtgactggttactgccgtatacattgaagtaaaagttgaacgataaacggtgacattttcttcaccatactgatctaaagccgcctcttcagataggccgattgaaccaataactggatggctgaaaataacggtagcaacatccttataatccatcttagcctgaggcttatggttaaaaaggcgttcagacagttgacggccagcctttacagcaactggtgttaattctaattttccattgacatctccaagagcatacaaaccttcaacattagtattttcaaatgcatcagtcgcaataaaacctctactatctaatgtgacaccagtcacttccagattaaaaccttttgtattggcagcacggccaattgcccaaatcaatgtatcaacagtatactcctcaccattttccaaaataagtgttagactattatcagtatttttaatcacttctttagggattgaaaaagtatgaagatgaggaccatcctttttcatttcgtccacaagtgttccaacaatttccttatcaaatttgcgaaggggacgatcccgacggacaaaaagatgtgtctcactgccaagagcatgcagaatacctgaaatttccacagcaatataaccagcaccaacaactgctgtccgtttaggaatggcatctaactcaaagaagccatctgaagtaataccatactcactaccaggaatatccggcagtaaggcatgaccacccgtcgcaatcaaaatatgcggtgcagtataatgttccccagctacttctactgtatgagcatctacaaaagtagcatagccataaacacgttcaacaccattgctatcaaaaccacgttcataagaatcatggatacgatcaatataagcctgacgattttgcttcaagacatcgaaatgaaaggtctgagttgttacatcaaaaccgtagtcagctgcataattattaatggtttctgctacttgagctccataccacatgactttcttagggacacagccaacattaacacaggttccaccgacttgcttgccttcaaacagaatcaccttagccccatgcatagccgcgcggttagcagaggcaatcccgcctgaaccaccaccaataacgatataatcatattgtttagtcataaaaataaagactccttgtattaatcataaatttactttatcacaaaacacttggactgacaattttttaatctgaaaaaacagagcaagctaacctattgcccagcaagcaggtaagcctgtcctgttttcttaaaaggcagtttcatcaggattgccctgtgatttgacattttcaattttatcaagctttaggatatcgtcttccgtcaaatcaaaatcaaaaatagcaagattcgataggatattcttaggtgttgctgatttaggcaggggtaagaatcccttttgcaatgaccaacgtaaagcaatttgcgctactgttttattatacttattagctaaatcttgagctgtttgattatcgaaaatacttcctgtgcctagaggactgtaagcctccaagatcatctcattttgtctgcagaaagcaaccagctcctcctgtgaacaaccgggagccaagagaacctgattgaccattggcttgacagtagccacttccagcaaaggctccaaatgatgaatcataaaattagagacaccgatagcacggactttccctgcctgatataaatcttccattgcccgccaaacgtcagcatttcttgtcttccatgcatcattttcacgcaaggctttaggattaggccaatgaataagcaacaaatccagataattaagttttaacttagcgagagattcttcaacagattgttttgcctcatcgtagctatgcttatcattccaaattttagttgttataaaaagctcttctctctttataggactatcagcaatggcacgaccaacactcacttcattaccataatactgcgctgtatcaacatgtctatagccaacctcaagagcataactaacgcttttataagcttcatccccatcagccaatttccaagttccaaaaccaattttaggaatatgaacaccgtttattaaagtgtacgcttccattttgatacctcctcgaagattactattacgactttcattatagaaaatcgaatcttaaaaagcaagatataactgacaacaattgctatatataaacgcgcatcttagttttgttctcttagtcaggataaatataagttaatcttcccaaataggaagccgtgggatcaaaccatccgcgaaaattggaaatatattgttgattcttataattagcttctttcacttgaatacggttattactctcaacgtgggtaacgtaagcaacatgaccataaccaccatcactccaacaagcaatagcaccaactttaggaacagttcctattttgaatcccttaacagctgcagtacttgcccactgcccgccattgccaagccaattaggtatccaaggagccaattctttcactccccaagtacactgaccaactggataagtgtttttttcattcatataggctgttattcttactgcagaaggttgataatggacaatctgattgagctgctgattagccaaaacatgtccgctagtcgtgccatcattataatgaacataaacatgaacattatagcttcctgtttgattgccatgcttttgaacatcggcagtaattgcagcctttccatttgctagctgtttagcttcataccaataaagattagcttgattagcatcagaccaaacagcagcactgattgattgtatcgcttttgaattgactgtttcagctacagtcacatcaaacgttcctttgttaatattataatgatcaatagttacctgaggatcttcatagttaataatagacggaacattaaaatgagtttctcctagaccatccagtttcttgcttaattggctatcgccataaatatgagcttgatagctgcctaattcaaaacgatgtgcctttaaataaacagttgttttaaatataccatcagccacttttgttgcctgataccatttcaaatcgtcttggccattttgttcactccacacaggaatggctactgaactgatataaggggggacattattaacaacaacatcataactggtatcatttattttatcaatctgaatcttgactttcggtttaggaatatcaatatcttgagcactaattggtatcatcttaccattttgcttaaggtaagtatgaacatggtaagttccataacctttatgattagcatagccagccaaagtattcccgtcagcatctgccgtgtaccaatgaagatcatcttgaccattctcagccgaccaaactgctgaaaaaagttgatccgctgcaccaggtttcagcttagaaaatagttgaaggccaccttgttttaaggataattgcggtgcagataaggataattttcgttttcccaaattaaccccgactctattaccatctgtataggtaatataagcatgcgcaatataagaacctaccttactgccatgattctcagcattaaaatgaactgtcaattgattgctgccatcattactggcatgataccatttcaaatcatcctgcccattttcttcagaccaaatcgcaacatctatcgattgaatagtttttccgttggctgcctgtacagcgttgacatcaaaagttccagcctgttcattataatagctaatcgtcacctgattatcctctgtatctgctgccgtataagaactaacagccagcattcctaaaatactgcttgcaaaaagtgccactttaagttttctcattctcaatcgaaatctcctttattcttttttacatcttattattcggaaataggatgtgaaattttgaaaaaggaactatctattatatatgttttttagtctgacttaagtaagacttttacaaattaatcacaatataaaatagagtttgccaatgacgctaagatgcaatcatcgaacaaactctattgttgtaaaataatagttaatctctgtgcctacccatataattgcctacagttgacaaaaagttttttagcattcttgacgaacataatttttcaaaaagtactattcctcccatgcacataaataggttaaataacagataagctgatggagcatagaaaccataaatgaaagaatccgtatttgggtcaatccatcttgaaaacagactaacaataaaaagatttagaatccctgttagtaatagagaagatagtataattaatttactaagattattagctgtgaattgatgtctaaaaccatcaataattaagatcaaataagcaagaaaagacaagggaaacataaaataggacacaacctgataacatttgataagcttttcttggaaattaatataataatttcttcttctaaaaatactagcatttaattgctgatagtgatttgaaagactagttaaattgacatcataatcactgtaggtctttgtgatccctactgcacttaactgatcattagttctaggcaaggaagtattcagcatgtcttcgtaagaaataagctcagtctctgttaaattaggataatctatataacctgatgataaatttgtattatagaaatgaaacattttattcgtcagatccagtgacatggtcatagattgactaatatctttccaatggaaggcacctgtttgtgtggagagatagataccatcgcgtttctttaaccttcccttttgaaaagcttcccccagttcatttgctatagctttataaagagcattggtttttttgccattaccatgataataaccctcttcttccacaccaaatcgaaaagcccattgagcaatatctcctttaatatcagtatttttaccagcccatagaccatacgaagctaaaactgtatttcctactgttcgtaaactcggacttgctttaatagctaattcgaaagcctttcgtgacgcccaaacattactgtcagttgtttgattatcttcaattttataaatgagactcatagcttttgctgcagctgtatcagagcgatcattaacaccccatatgccataatagctatagttaatagctgagacccaaacattactaacaactataccaattaaaggtaataatacaaggacactccttaataaaatttcatgtagatcccttttataaagaataacaattgttataataattgttatagcagcaactaatataaaaggtaaaatccaaatagaatcttcccgcaatgtccaaaaatacatgatagaaaagaaagctaaaatagtccacggtaaaaacaaagataatctatcgcgacgtcttataaagatagcaatgtaactagatataataagtaatagaacccatggaaccagtgcattacgataaatgcgataaaaagcaccatgattgataggcgtaaaaataataacaaaaaagataagcaacagtaattttttactttttactacaggctgaatggcctttataaaactaaaactagacagactgattaacaagccataaagtacgctataagggatatttaacagctgagttagagcaagaaaaagagggtagcctacatttttagtcattgaaatataagaataagttttacccaaccaatttcctgaagcaattgaaatagcatttttaagctgcagtaaatcatcataacctgtattagcatccaactcccatggagcacttctcaataaggctattcgaaaaattccaatgaaacataatataatataaaatagagtactttttttaatagtcacattcttattcaattagaccaatctccctcttttttatctacataaaattctaaaaatttaaaatggtggctaataagctgagttagataaaaatttgaacatttttataatcgccacaaataatacccaaccccagccctaaagactatttacggccattacgctcataatagtcataaattttcagttcatattgcatacgattctgacgaacaatagtatctaaaataaaacctaacgcaaaagacaaggctgctaaaatcataaaacctgttgctaaaatagctgatggcattttagcaataaagcctgtttctgcaaattccgtcacaacaggaacacctacgataagacctaaaataaagaaaaataaagtcacaagactaaagaatatgagtggcttataatctttaaagagattaaaaatcatacaaagtactttaaaaccatccgagaaggtattcagtttagattcactgccctcgggacgatcatgatatgtaataggcacttcgactagtttaaaacgtttgtcaagcgaatggattgacaattcagtctcaatctcgaatcctgatgataagacaggaaaattcttaacaaagagacgattaaaaccacgatatcccgtcataatatcctgataatttccttggtaaaggtgattaactaaaagtcgtactaaattattgccgaagccatgaaacccacgcttattttcttcagcataagtcccattagatagacgatctccaatggtcatatcagctttaccagaacgtaaaggatctaaaagcttttgcacctcgtctgctgggtaggtatcatctgcatcaaccatgatatagtaatctgcattaatttcacgaaacattgaacgaacaacatttccctttccttgacgagattcaaaacgaacaatcgcaccagcttgacgagctaattcatttgttctgtctttagaattattatcataaacataaatgtcagcttccggtaagactcgcttaaaatcagagataactttttgaatagtaatctcttcattgtaagctggaagtaatattgcaattttctctgtcatagtataaattctcactattaatattatcaagcaacaaaatttagaatcaacaacaattaaacatgacttactagtaaatgctaagctctggttttataaagctattgattctaaataaaaatgcctatagcctttatcctttttccttaacaatataaactggtcttttcttggtttccaaaaagattttagcaatgtattttccaataataccaagtgacaaaagctgtaaaccacctattaaaagtataatagacaccatactagcccagcccgtaacactgcccccaacagttaattttcgaatgataataaataaaatactaatgatggaaagtaaaaacgaaatagcccctgtccatgttgccaagttaagcggtgcttcagaaaagttaatgaaaccatccatagaataacgtaaaagagtccaaaaactccatgacgtttttcctgcaacacgttctcgattctcataagctacgtaagtgacatcaaatcctacccaagagaaaaggccctttgaaaaccggttgacttcgcctaactttaaaatactatcaactacctgacgtgtcattaaacgaaagtcacgcgctccatctaccatttctgtactcgaaattttattaataagccaataaaatgttttcgcaaataaagagcgaataaaaggctcccccttccggtcagcacgtcgagtacctaccacatcataaccttgttttaatttagagtacattttgattaacaattctggcggatcctgtaaatcagcgtccataaccgtaataagatcaccatctactgcttccaaccctgctaaaagagcagcttcttttccaaaatttcgggaaaaagagagataatgtacattttcaaaccgagctgcagcctcacgtaaaactgttaaagtcttatcacttgaaccatcattaataaaataataatcaaaaaacagctcatcagacatttgtctttccactttttgtgtttcttttaaaaatgggtaaatggtttcttcctcattataacaaggaataactattgaaagttttttcatttttcccccttgaaaattaataattggatttaaattttccttcttgccatctcaccttttctttaagtaagggatatccctctttcaaaagaagtaaaattacaatgaagacggcaaaaagtaatggaatataagttctgagttgagaagcataaatagttggcgacaaagagactagcattcttgaagcatatcctgcaaccaagataaccacggccagcaaaccctttattttttcttcaaataagtaaaagataacaacagttattattaatagcaaagccgtataaataatcaatggatataaattctctttaatactaaaataaagatgatttttccttacattttgagtatcaacaattttttgtattgctgtaaataaattactgatacctaacttatttataatgagtgtatacactataaaacttatagcaactgttgagaaaaattgtttctttagaagagatagaataataattataagcaatagtataaagaaaatatttaattctgcggttacaaaaataattctgtttgtttccaaataaccttttagaattttcgttattagagataatttattaaaaccgggataccaagtggcaatctcttgcgagagacgactgtcagaacctggagaaaagaatgctgatataagacctaataaagaaacaccaaatgctcctaaatatctcatattaattttttgatttttaacaaattctgctataagaagaaaacctataataagaaatcctaaaacagtgaactgttcttgcataaaagcaaaactaatagcaataaatgctaacaatacagagaagttatttttctgatttaataaacaccatccaattactagtgcaaacatagggaataagtaattcgttactgtaggaattaaaccagcacttgtaaaaagcactccgggaaaaataacgataaaaactattggaagactatattttacatatagataacccttttcaggaagaataatctgcttcaaagcatataagaagagaaaggttaaacctaataaagaaatatcaaaaataatataatgatgtcctgacataaacatcgtcactgattcaataagcaatctacttgaccaagtttgatagcgataaatggcatactcaaagaaaccatgtttacttaattcatgcgcaaagatcgtttgatctcctgcatcattaatatatactaccagctctaatgtaaaaataatactgacaataaaataaaataacaataggcggtaatgattcttaataaaacttattaccttttccataaatactctccttctatatattagcattgaaatttctcataagtatttttcataaaaaaagatttatcgaatgtcaaagaatcctttatagtttctgatatatccctttcctacagttatatcatattgtataagcttcaaatcgttagcaatttctttttgttctttagtcagttttccatgaccaacagtagtattatctaaaacttctgttaatagagcgtaataaggcgaaactttcgaattggtatgttctagaagttcagctgtaaaatcactagaattaacataagaatgattcaaagtcttggtattataattactccagataaagtaatctgtttgatattgactgtccggatcttttttgaaagcactttcaggatacaaaccaggtaaatggtctccataaaaaacaactgttactttgtgtttcagctgcgaaagttgggctaaaaaatctttcgtttctttatctgtataggtcagcaatcgcgcataactagataaagaaccattttcatcttttgtatagcccttgccagtagcaaccacatcacttggctcatccgatgcccaaggtacatgattttgcattgtcattacagagaaaaattgactttgagaaggattaatcttatctaaaatattctgataagttgttttatcactaacattaagtcctactttttcagaatgagtaattttgtcactggttccactggaagcaacaaaagtcggaaattttaatttatcataaacatattttctagaataatttgaagccgaagatgggtgaataacaactcgatttttcgatttaaattgattactgatggaaggaaaaacagacatatcaggaacaacctcggtatagagagttgaaaccgaagagttaaaattatagtatggcaaaccagttaatgattgaaattccatattggcagtaccaccgccataaccatctgaatgcattaatccgctagttgttttttctttaatctgtttaatattaggaataacatcacgactaaggttaactccttgaacacgatcaggatccgaaaaactttcacttaaaatatagataactgtctgatttgaaatattttctgttcgaaccttattgattttattagctacattattatatttcttagctaatttaagaatacgctctttactgtagtctgacggtttatccataatagacttggttacctgctttgtccaaacatacatcagagatttataactagcattcgaataaaagccttgatagcctatatcaacccaattattaacctgagatattacaggaatcccatttacaattttgctgcctttctcatttctaaagatgataaaaatactaaacccaagaagacaaatagaagagataagccctacttttaaccgatgattttccgtaatttttccttgcagcaaacgttttctaaggaacaaatataacagaatcagagcagctaaaattaatagagtactaaaaataatattagcattaacagaacgtgctaacaatcttatattagtaacccatgcaaaatctgtcactagcagaggttcattacgcatacctaccttaaggacattaacgacagtaataattgatcctaaaataacaattagaaaagttacaagtagatagcgattaatgatcaagtataagaaaaaaccagccgctgtcaataccaatatctggtaagcagttgctcccggaacaatatacttacctaataaatcagcatcattttttaagccgtattgaaaagcatagttaaagatagtagcaaataaaagactggaaacaaaggctagggagagattgggacgattcaatttgatagaacgataagcattaaaacaagcttctacaatcacactaaacaagattaacgttagcaaagtataaagaaataaaagactttcataggcaagaggtttgtggtaataagcccttaatgattcctgtaaaagtttaacataaagcgtatcgctaagaataaaagaaacaattaatccagttagaagaaattcagtttcagaaaagttctctaaaagtagagtcattttccgagacaaatgtgatctcttcattttcactcttataagataattcaaagcaagtgtgcaaacaataattaaaactaaagtcggtaaaaaataaggctgaaagaagtgattttttgccaaatcccaaatcttaaaagactcattatttaattctctggtaacagctagaaaataggatattactatataaagaccatatcctaacaataattctataaaaaaagttttctttagatttttagataaatagaacgatagtcctaaaatggagagaacataaataacaagacaaactcccccgataattttaaaatgactaggcaatgcttcccaatgctctatcataatatcaaagtttttcgaaatgactttaaaagacaaagatgaatttgctctacgtcctattaaaagatcataatttcttaatgtgacattaagagcaaaaatgaaaatgaaaataagtaatttttgctttccaagcatatcccatatttttttcaattgtttcatgactttattttttgcagagaacgcttcaggatatatttgacagccctagctggaccaatgaaaatatatttaaaagctccctttattcctcccatatagttaaaatcaacaaaggtatttggtgctgagttgccacgttcatttaataatttattatctatgaaaggcgtcagatcaactggatttttagaaattctaaaatcgtaatgctcattccaagcaatgtagatcagcaaacgctcaatagcatgtaaaatagaattttgcggtaaaggttcctcaggcacatcatcatctgtcagatttaaatcaaagagcggttttaaggcatcatatttaaaccaaacaaaagtgccataactcatgacaaaagtatgaaaagcattgaaatcaatctttttggtcatgcccatcttttgccataatgtattcatctcaggtgcaatcaaatgttcattccaagcatcaacaattttattatagcgaaagaaagttggcatgtcagcaatcaccaaaccaattttggggttttgctgtaattgcgctaaaatattgtctgctggtttaaccaacatgtcaattaattcttcccgccaagattggccagcccaaaaatcagcctcctttgactttttggtatgaaaatgaccaacaaaatcataggtagataaataattttttaattttaacataggaagaacatcacgtccaatattgcctgtgacaaaaacctgagcttcttgactgtttgcagatagaatctcttcaatttcagctttcttatcatcactatctgtcgttataaataaatcataagaaaaatgaaattgcttaaatgccgttaaaaattcttccagtaaatccacataaaacacatggagatgaaccgcaactttttgattctttaaatcaactctttctcttttcttgacatatttgtgacccaataaataactaaaatcaggataattgatttctgacatgtgcgaaacaattaaatcaataggataggtcgaattcttttgaatatcatttaaaagatagggcgtaatatgttgattattgtcaatcgctttaaccttgataaagggcaccctatgattcaaaatagctgttggattatagtaagagaagtctgcatgaagcatatgcgaagcatcttccttggtcgtatcaaaaacgacatcatattgaaaaccagcatctaagagagttgtcgtgacctgagtttcgtaatcatcaatgacacgttgaatatctgcatgattttggatgttctcccaaaaattatgaaaggcctccgattgaataacagcttttttaaaggtaataaagtagctttgaatatgttccttaaactgcttagtcgcacgattattagtcaatccccaaaaatcaactgtcgtcttggtttcaaattcttgataaattgaatacatttcccaaagaggtccaaaacaagtgtcattcatggttgttaccgagtcatatgtcacaagttcatcaaaaccgacaaagaccattccatctcgccaagctgcaaagtcaaatccagaattctgccgttgaatgaagtcatcaatgagatgcttttctcttagcattttgacatccgcatctgccacttggctatttgaaataaagataacttttgaaaacaaggatctcatttgagtcaactgataaacgacatgggaacttacccgattgtatttattaaaatgaacatataaaagcaggcgcttcatttttttctcctgaataagttgataatttttgtaggaatggtccaacggcgggaatgagtgactgaattgtagcggacaaccatctcatttaactgttctagatacaaatctctctcagcaacagctttttgatattgatacttataaggactgagcatttttagctctaccttcttttgatccaattccttcactaagtgattcgctaaaaaatcaggctgacttggctgatcaacattaaaccattcataagtcagtttaaagtcttgcccttcttgtgcggttaaatcatagatcatttgaggatcgggagctataaaataataagaataaccaaagactttggcattggtccaagtcggtaataattctgtattaactgttgtatttaccaatgacacttgacgatagtaacttgggatttcagataaatcaatccgaattttccgtatattttctggaaaagtcaattgaatattgcccgaatgctgcaaaggaaactgaaaacaattttcttctgaaaattcttgatcatctcctttagctaaataaatggtaatctgctgattatcccaaacattttttccatcctgagccagaactttttcaaaatcattatgcttaggcaatagatattctagaactttcttataatcactatcagggtacttttcaatatactcaagctgcgtttctaagagtctatcaaatcgctgggctagtttttctgaatccttagaacgtgaatctgactcagcatccatacgatagacggttgtagaatcccttaaaaacgctaatttagtttttttaaataattccaattggatattgaaggtatcatcaacggcatctttattaattcgatcattaatttctaacattaatttagtttccaccaaccaagtggaagccatcgtcatcccttttaaggcaagcatcttttcataagaatccataaaagggataatattattttttagtacatctttatgaattatattccctttagagtccaccatgtcaaagtctgtattagaccattttgattcaggagatgtctctaaaagatcaatttgtttttgaagcttaaaagggtctatccaataatcatcaccatcacatctggcaatgtactgtcctctagctttcttacaaatatcagaccaagtttttgtaattccttgattttcttgattaaagaaagcccgaattaaatctggatactgtttttgataggtttttatgatatgaactgaatgatctgttgaagcatcatcaacaattatgatttcatatggaaatgatgtttcttgtttcaggaaactatcaatagcttcaccaatccagcttcctttattataattggtgcaaataatggatacttttaccattttaattctccgacactatatcctatgaaaattgccactgcccattcctttgaataagtccactggcagagtccatagctgatttgtcatcaccttcaaggtcatctcgattaatagaaataataggtgtatttgtcgcactagaaaaagccaacatctgcccttgcttatctctaactgtcacttccaattttaacttaatatcatttaagcttttcagatggcattcataaaaaacccgtttctttcctgaaccactggatagatagtctaaagaattgtcattataaatccaaatattacgatcaacatctgtcaaagaaagagcaatatatgttcccacatctgcaagaacgttataagaaatttcaaaacggatggagtcccttggtgtcatacgattagcagacaggagttttacttcaagattatcaacaacaatttgctcttcttcctgaacggctgcttcctcttcttgtttatcctcaacaatctggtctgtattatctaaactgtattggttagccacatcaaatggctcaccaattgcctttatcaaaccatcatctattaaaacagctttattacaatatttcttaactgcagccatatcgtgcgttaccaagatagtagtcttgccgctattctttctttccaaaaagtaatcattacatttacgctgaaaggcttcatcaccaaccgccaaaacttcatcaagaatgaggacatccccttgcgcttttatggcaacagagaaggcaagacgcacctgcatcccactagaatagtttttcagcttttgattcatgaaatcttgaagttctgcgaagtctacaatatcctgatacatagtatctacctcttcagttgtgaaaccaagcatagccccattcatataaacattttcacggccagtcagttctggattaaaaccgacaccgagttcaataaaagaaactaatttcccatctacagtaactttgccttgttcaggaacataaatttgagaaataatttttaaaagtgttgatttaccagaaccatttcggcctacaataccaaaaaagtctcctttttcaacttcgaaatcaatatctcgcaggacatgctgtttcttataacctttaatccctttaaaacgattgactaaggcagttctcaaactttgagtactttcaacaggtaacttaaaatacttactgacatggtcaactttgactgcaatattattttttgtcattagataatctccgcaaatttcttagcattataattgaaaacaagaaaaccgataataaacacaaaaataggcacaagatatggaatgacagcaatagatttatgattaatcatctgccaaatagtaacattagctggatcaatcaaaatgtgccgcatatcctgaataatttgagcaattggactcaataaaagaagcttagcacctacaacactgcgagtagcaatataagtcaaagaataaataattggcgttccatagaaccccccttgcagaataacttcccaaacaggaccaatgtcacgatatctcacataaagcgttgataaaataaaggcaatccctgttgagaaaagcaagagctcaaggaaaagcggaatcaacaagaataaattccatctaaaagtaaaagttacaccatttaaaagggcaaagattaaaacaacaattacattaataccaaaattaatagcagctccagagactgctgaaaaaacaatcgtctgcttcgaaaaattaagtttacgcagtaaatcgccacgcgttacaacagaaaccatacccatcatggttgtttcttggaaaaatgtccaaataacatttcctagcaggagagcaacaggccagtgaggcacatcgccccctaaaggtaagaaacgaacaaagacaatgtacatgatagcaaacagcatcaaaggcttcaaaattgaccaaaggtagccaatggcgcttccttgataacgaagtttaaaatcagtcttgataagttcttttaatagaatacgatttttacgactaaaaaagtccattattttctcctataaccaaatttagtaataatcaatgtcttaaaaacaaaagtatgaaaggcacgattcttagcaaaaccatattgtttgagccatttaatcctgtttaaaaacgactgatccaacaaagtcacataagctcgaataatagccttattagctgccggcaaatccagttccaataaatgactggcttgttgctgacttgatgttactaaccaccagtattttttcaccaaacgatggggacgcagccaatttttcaaacgtttagaccaagttctagctcccaaaacattactttcatgctggcggtataattctgtggtctcatctagataaatcaatttacctagactggcagcaaggagcgctaaataccaatcatgcataatcaagtcatcataacactgcttccactgcttagctagacaatgattaaccatcatagtcccgccagtaactgtattttctgttaattcctcaagtaaactagtattagcatgatgagactgtgttttgatcatgctatcatgcaaaacttgcaaatctctatctactactgtcaaatctgtataaaccatcaaagggatttgattgttttctttttcaacacttgccagagttaattccagcttttgcggctgccaaacatcatcttgatcgctaaaaaaatagtaatcggccttttcatattttagtaaggtatagaaatttttgatgacaccaaaattttctcgtttatcagcattgataaaacgaatccgcgcatcagacttagcaaagtctgcaataattttaggagtttcatcactagaaccatcgtcgcgaataagtaagttccaattttcaaaagtttgtttttgaatactttggatttgttgggcgatgaattcctgaccattgtaggtggacattaaaatattaactttcatgtaagaacaagtcctcgtactcttctacaattttctcccaagtatagtaatttacaataatttccttagctctttgtccatactctgcaaaattttcctgcttatcaaattgattgattaactgagcaagacttccactatcctgagtccaataccgtgcagcatctaatgctactgtataattaaattcagtaatcaagacaagattcaagtccgtatgggctaaagcttcaagcaaaccgggattagtccctccaacctcgtgaccgtgaatataagcaaaagcttgttcacgaatataagttaaaagaggacgatcataaactgtcccaacaaatttaatacgcttatctttatcaaattcggttttttgtcgcaaatcttcaaaataggcattgccttcataattgcaaataataaccaaatcacgttcacttgacgaagtcatgaattcacggatagctgtttcatagttattctcaggaacaaaacgtccaacaatgagataatatcctttatctttaatagcccattttttataaaagtctttaaccttggaatcgttttttgacagccctgaaggtgataaatccgtgccataggcaataaaagtcgtctttgcccaaggatacatttgtttgatatagccttcaattccagtattatcagaaataaccaaatcagcttttttggtcatgcatttttcagcatatttaagataggcttgcactggacgtgaccatttagaacgtcgccattccaaaccatctggattaatataaaatcgtccgcctatgcgcttaatcttacgagcaaagggtcccataaaagcaccgattgtatttcctaaaatataaaaaatagggtgtttgattttttgatcgttgatcaactttaaagcatagcgaatagccatcatatcataagcaatgactctggcaggacccagcttaggagccttaatagtaaaacaatcaacacctaaataggtaaaatgcttatgctggtcagtctcactaagacaggccacatgataagttaactgctgcgactgtttatgcttaaccaattcttccacgaaagtctcaaaaccaccatattttgctggtaagccgcgacttcctatgatgaatacatgacgcaaactctattcccccattttataatacaatacattatattatagcatattttaaagaattttgcgaaaagaaaaaacaggtttaaacctgtccttctttgctaaaatactattttttgacatcctgcttataaaattcttgtaaagcttcttgccaagtcggaataacaaatcctgtcgccttagcctttgtcaaactcatagttgaatttaacggccgtttggctttagcagggaactgactagagtcaacaggttttacgacaacatcggtatcctttaaaatttcaagtgcaaagtcataccaagtcgtatcctcggttgcatcatttgataaatgataataaccatattctttttgattttcagccagataagtcataaattcagctaaagttcgtgtccaagtcggacgaccatgctgatcattaacaactgttaaactgttatgacttttagcaagatgttgcatagtaaaaacaaaatttttaccataattaccaaatacccaagctgtacggatgatgtaaaagttcttaacgtatttttcaactgcttcttcacctaaacgctttgtccgaccatactcagtcttaggatctggcttatcatccacttcccattcttgaccaactggcttttcaccatcaaacacataatcagttgaaatgtaaaccaaagttgcattatatttctcacaagccttagcaatgttttcagttcctgtcacattgatagcataatccaactctttaccttcatcttctgcagcatcaactgctgtataggctgcacaatggtagacaagactcggtttaacctgtaaaaagacttcatccactttttcagcttttgtaatatccatctctgcaacatcaacagccacatagtcttcattacgttcattaagtaaatgacgtaattctgtacctaattgaccattacttcctgtgattaaaatcattattttttctcctttaaaaagctttattactattacctaaaaaagactaaaacaaaagtatcaatctcattatataaaatagttataacagcatgatgaagttattgattgaaaagcattacctcttgattcacaaagtgatagcctcataaatgttattcatgtcaatacctaatcaactgtactgggggtaggactgcaaaatcaattctacgaaatcacgattttcatatgtaactgatagattagactattttgtgggtgattacgcaacaatcatgtgtgtctggcctattccctttttaacaatttaacttcaacgaatccctaacgcaatacgggcatagcggctcattttatccactgtccaagctggtgaccaaacaagtttcacatcaatgtccaaaacttctggaacgtctttaagagcatcgtggatttgatctgtaagcaaatctgctaatgggcagcccatcgttgttaatgtcatatcaatttcagtacggcctgaatcttcaaaacgaatatcatagataagacctagattaacaatatcaatacccaattctggatcaataaccatttccaaagcttcaaggattctatctttaattttagtaatttcttcgggagtatagtttttatctgccatagcccacctctcttaatcttcaacaaagtcacgcaactgcttgctgcgactagggtgacgcagcttgcgaagcgctttagcctcaatttgacgaatacgttcacgagtaacatcaaagactttaccaacatcctcaagtgtccgcatttttccatcatcaagcccgaaacgcagacgaaggacattttcttcacgatcagtaagagtatccaaaacttcatctaactgctcacgcaagacaacacgagttgtataatcaacgggattttcgatgacttcatcttcaataaaatcgcctagatggctgtcatcttcttcaccaattggtgtttcaagagacaccggttcttgagcaatttttaaaatttcacgcactttatctggtgtcatatccattcgctcagcaatttgctccggtgttggatcttgtcccagttcttgaagaagattgcgctgttcacgcaccagcttattgatcgtttccaccatatgtactggaatacgaatcgtacgtgcttggtccgcaatggcacgtgtgattgcctgacgaatccaccaagttgcataggttgaaaacttgaaacctttggaataatcaaatttatcaactgccttcattaaacccatattaccttcttgaatgagatcaagaaactgcattccgcgtcctacgtatcgttttgcaatggaaacaaccaaacgcaaattagcttctgccaagcgctgcttcgcttcaagatcgccattttcaacagcaatagctagttctttttcttcttcattagtcaaaagaggaacaacgccaatctcttttaaatacatgcgaacaggatcattaaccttggcagaattactgcctaataattcttcatcggttaattcttctggtttaatttcttcaacagcatatttggtagaaggattgccttctctgtcagtaattgagataccgccatctgtcaaacgttccagcaaatcatcaatctgctctgcttcaagttcaaaagggataactaatttttcagtaacttcatcatcaacagcaactccctcttttttatggttgcgaataaaatctgcaacttgaacattaaaagtacttgatgtttttttcttattatttaccatttttcctctattccatatttcttttttgagcgatcagggctgctaatccctccactgcagtatctacatcaccatgattgctactctctcgaatagctttgctttgtttgcgcatttcttgtcgctgcaaacacttatcaatttgatcttcaatctgcttaatttcatcttcagcaatttcttcaggaagattttcttctaaaacacgataataagtttcctgaagctgattggaaagttgagacaaatcataagcattaatctcaccgttagttttgagaatttgataaagttcttgtaattctggcgttgcaaatttaaaatgagcacgattacgaaattcattcaagaggtaatcgtggtggagtaagcggtggaataattgactctcggctttagttaaagcggttaattgtttagttaccggcaaatctattaaaacctgctgattggctgactcttgttcgctgatttgtgaacgcgtttgcagccgctcattattaactgcctgttcaacctgtaaataatcaaaatctggtagaaactcagctactttattaatataggtattctgagctgttatagacggtgaagcagcaataaccttagctatcttttcgacatagtcaatttccgcttgcaaattatcaatattttcaggttttagatgttcaatccaaaactcagcactgctaatccttgcttgttttagcagcttttctaattcctcttctgaattctccttgataaattcatctggatccatctgtccgggaattttaacaatttccaccgccatattagacagcaagttcaatgatttagcaatagcattttgtccggctttatcaccatcataggtcaaaataacttttttagtaaattttcttaaatgcttaacatgttctggtgttagcgctgtccccatagaagcaacagcattaggaatacccgcacgataggctgcaataacatccataaagccttccataagataaagttcatgttcttttttagctgcagtcttagccttatccaaatggtaaagttcgtaagatttattaaaaatgattgttgagcgggtattcttatactttgctaattttttagaagtatcttcttctgtccaaatccgtcccgaaaaacctataatgtgtccaaattcatcagtcaaaggaaacatgatccgattacgaaaagcatcataaatggaattgctatctgatagattaaacaaacctgaattaataattgtatcttcatcatattttttgagcatggcctgatacagataatcatactcattgggagccaaacctatcttaaaataagtgataagttcatctgtcaaacctctctcataaagatactgccgtgcagtttctccaactttcgttgtcttcaaaacagcttgatagaatttgttcgcatcttcattgatattaaaaagtttttgatgtggatgttcctttttaacttcttgactcttatcttgaagagtaacattaatacctgaacgctcagctaaaacctgaacgctttccagaaagctaatgttacgataatcctcaacaaatttaaaaacatctcctgagcggccgcaaccaaagcaatgaaaaaattgacgatcttcaataacattaaaagaaggggtcttttctttgtgaaaaggacaaagtcctaaataattacgaccagagcgtgaaagactaacaacttcaccaataacatcaacaatattgatactgtctttgatttctttaatcttctctttatcaacaaccagaagtcatcacctccacctcaaaattgctttttagcattgccttttattataacattttagaagttccttgtaaaataaatgataggcaaaaaagcactttcggttaaagcctaaacttaacctgaaagtgctttataacaacctttcactacttaactgatagaattggcataaacagcattattataatttgattttaggtgaatagctttaaaaatccacgcctcgcttttgccattttgattgaaacggctgaccaaagagttactaaaaacattatcataaattttgacaaggccgacatcagaagagtgctgtccgatagttccgctgtatgctattattttgccatgactgtctatataaggaacaaaagagttattagcaatcgtgatgttattgcacaactgtttctctttattataattttcataatttggatcaatagcctttatcaacccaccatcccaaacaccgctagactcagcggcatccagctggataacttctgaataaaaatcatgaagatctgcattatcatcaatcttactgacattagttaattcaggggcatagccagtaaattgatttccttcaaaagctgaattttgcaaggaacctaagtcaaaaatgtggcttccttttttatgcaccatggtaaaactattgttacaaattttccaattatcaccatgatcagccataatcataaactgatttcctttttccaaatcactggcttttatattgatattgcgcatggtgaaattctttacaccatcactagctgatgtcccagttgcaaaagcaaaccaataagccgatccttcaaccaaaagtgtcgtattatctccacgaatttcagtatcagatgttaaagtgatataatccttgtctggtgtctgactgccaatcttaaattcaccgtttggcaaacttaagatagtaccagaatgttgtttagcatatgcaaaagcttgtttaagaatctcattattttgagctgcagtattttctgattttagctgaacttcataaaccttatccaaatctttttcttgaatattagtcaccttgccgccttcatcaaaggtgatatcatacttatagccacctgtggtattgctatgattataagaaatatgatcgattttaccagctgatgcacgataatccgttaaactgctgccatctaaatcagctgtcgcagaggattttaatttgacaatttgacctttgctgtattttgatctttttgttttaactaagtctttttcctgaacatatttcaaagctttgccattatcaaatgtaacttcataactataatgatgcttttgacgactgtctttttgtgattttatctttttaactgtcccaatccaattttggtaatgagacagcccttttccaagactgtcttttttagctgaggaactgatctgaacctgttcacctgaatagtaacgtgctgtttgttccatcttctttttaccaaaaggaagtgaaatagttatcgatttattgattttttcaagatgaagactcttagcaagtaccccaaaagaattggtaaatgctaagagtgaaacggctgatgcgacaaaaagagttaaaataatgatttcattttttcgaaccagcccttttcgctgacgttttctgctcttcattttcttcctttcagtaaattagtgataatattatagcatactttcattttagcagcatttcaattttaccacaattttgaaaaaagtgaagcataagtattgtaaaacctagtgtcttcctgtataataagaatctgatgaacagaaaggaaatctaaaatgatcaaagaattgaaagattttttatttaagggcaacgtcctagatcttgcagtagctgttgttatgggggctgcttttaacgccattatcacttccttagtttcagatgttattactcccctattccttaacccagttttaaaagctgccaatgttaaaaatattgcttagctttcatggaacggtgttgcatatggcagtttcttaagtgcagttatcaattttcttatcgttggtacaacacttttcttcgttgttaaagctgcaaacaaagcagtatcgcttggcaagaaacaagaggaagaagctgcaactgaagtcgaattacttgctgatattaaggcgcttcttgaaaaacaaaactaatatagcttgcttcaacaggctggtagaacaaaaacaaacttcttattgaggtttgtttttttttatgaactctcaatgagattaaattgatgcagaaaatcgtttattcgaattttgcaacaaaaaaacaggtctgacctgtttttttatttaatcactttagaattttttacgtttgcgagctgcttctgatttacgtttgcgctttacagaaggtttttcgtagaattcacgtttgcgtgattcttgaagtgtaccagctttagttacagaacgtttgaaacgacgaagagcatcgtcaagtgattcatttttgcgcactactgtctttgacatgtatctcactcccctcaatttcattgtaacatttacacgttcttaaacattatacaaaaatacgataataaatgtcaagacgttttcaaaccattttaaaactattttcaaaaaacaaggcaataattaaaaattattgcttgctattctctcataaataaatggcattaatggcgctaatcttttaactgcagagaaaaagcaaaacatctaaacttgcttttcgatttattaatcaatccacttgctgaccagttaatttaacagcatcgctgataaactgcttgtatttatcttcttttttgagtttcttaataaccttattcaccgtcttaactaattgaccactgtctttaggcagagcaactgctttggcatccccttcacccgtttttaaggcaactttggcaagaaccaaatcactattttgagacacataaccttctgccactggtttttcaagatcaatagcatcaacctgaccagatttgagctcattaacagcttcgcccatcgaagtcaaagaggtaatgtttgattgttttaattgatttttagctaatccttcttcaatcgttcctttttgaacagctactttagtcttattattaaaagaagaaatcattgtatatttgttcaaatcagactttttaataagaatagcattttccgttttataataagcttctgaaaagtcataggcttgagcacgttccttggtataagataaaccagagatagctatgtctgcttttcctgtttttaaactggacaagacattatcaaaactcatggaagataattccagtttcactcccaattctttagcaattgcttttgccaaatcaatatcagcaccaacaacagtatccttaccgttcacaagagccttgaactcaaaaggagcatagtccggactaacagcaacaactaactttttcttttctttaatatcatcctgtaaattttttgaattagaagaactgcaagctactaaagtaaatacagccacaaaactcaacaaacctaaaactaactttttaaatgtcattctttcctcttttctattaacccaaatctattttaagtgatctttgcctattcgtcaaattgccgcaagcattgcgataatctggttaaaccagcttttaaaatctctgtatcaccacaataacccagacgaacatgcccctcgatatcaaaacgattaccaggaaccacaagcacaccataatctgataaaagctttaggcaaaaggtttcaataagcatcggaacattcagcttaataagcgaagtcgaaacatgatccggtaaaatagcctgagcacgcggttctttagccagccaatcttgcagaatttgcagattatcgaccacaatcttttgattcctctgaataattgcctgacggtgttttaaagcaaaacttgccaacatgtcgtcaaaaacaccagcacaaatcatggtataatcgcgataatctcttaaaatagctgtcactttcttattagaagccacccaaccaacgcggattcctggcaaagaataagctttggacaagctatctactgaaatgcctttatcatataaatcaacgattgccggaatgtctttgtcagatgcaaaggttttataaacttcatcggataaaatataggcaccacaagactcgacaatagcaactaattctttcagataggcctcatccataatagcacctgtcggattgtgggcgttattgatgcaaatcatcttagtattaggacgaatgagctgccgtaactcatctaaatctggcagccatttactatcttccttaatctgccacaagtcaacttgagctcctagtgatttaggaatatcatagagctgctgataagttggatacattgaaataacatgatcttctggttcaatcaaggcatagagagccaacatgtttgctccggtggcaccattggtttgtaaaacctgttccgcttgaatattcttataaagcttacaaacctcagccttaaattgaggcgagccttctatccagccatagtccattttcttctgccctaattcttgaaaaaaagcatttagatcttgctgggttaattgaaataattcttccaaacttaaagcagcaattgacacaccagcaatgtcgtaggtggcattcttttcatggacattaagccactcctccactccaaaacgtggtaacttcattttgactccttcattctttctagtattgataatacttaataagcaggaacttgtcaatctttaaggagagtttcagacataataaaagcgggacaaataggcaaattgcacagcaatcatgcctgtctatcccagcatctaactctttagtatattattctaatgattgactatttcgcactccaactataaattgtgaaggctttacttaaattttattttccacctgatacagataaattataggcatctttgacaaacttatcaatcttatttgcttttttaagttttttgataactttatccactttcttcttaagtgcactgcttcccttaggcatagctacagcataagcatctgatgaacttgattttaacttaatttgagcaatagccaaatcatcgtttttagcaacataaccttccgcaattggcttttctaaaacaacgccattgacttgacctgatttcaattcattaatcatttcaccattttggacaagagaaacgattttagcacccgttaattgctccttagcaacggtttcttgaattgttcctttttgagtggctactgataaacccttgagagaattggttttcttatatttagctaattctgattttttaacaataacaacattgacagattcataataagtatctgaaaagtcataaactttttgacgttcttttgtggcagaaattcctgaaataccaatatctgctttgccagattgaacactggacaacacattattgaaagacatagcagaaaattcaactttgacccccaattctttggcaatagccttagcgatttcaacatcggcaccaacaatcgtatctttaccattgaccaaggtcttgaactcaaaaggtgcaaactcaggattcatggcaacaacaatcttacctttgttcttaattttttgcagcgaatcatccttagatgacgaactacaggcagcaagggtgactagcattaaggcagcaataattcccagcaaaattttttttagctttttcatgatattcctcaattcttatttgtaagataaaactattttaattcatatttattcatttgtcaagtatttttttataaaaatccattgtatcttaaaaatagtacttcttaccaaaactctttgacaaaatcatctgctaggcgttcacgataaaagagttcagataagtttttttcttcaaacacgcgcagcagattaagcatatcataagccaaatcaagctctgccaactcttttcttgctacccaacgcacttgtccttcagcagaagactgcaagtcaccttgaaaatcagatgtccgataaagaaaaaccagataacgaacatcttccttggtataccaatgcttcatcccaaccaactgtggatgatgaatggttaatcctgtctcttctttgacttcgcgaataacagattccactaaaccttcatgttcttcaatgtgcccgccaggcagggcagcaccagaccaagaataacgcttaggatcacgaatttgcataacaatatttccattgccgtcttcaattaaacacatattagttaggatgacttgagaggtacgggacacggggttctcctttatgattcttttaattaatggaatccattataacatagttaacacttaatcacttaaatttcttgaaatgaccaattcgctcttaaaaccatttaattcaaggacattttcacaatcttggagagaaaaatcatcactcgctttcccattttcttcataggatatttttgtggcaaggccttttttaacagcttggaaaagataatctttaggcacttgaatcttagatgtcgctgaaagctgattgagagcaatctcaccttgatgagatagaatgtcaataaacatatctaaattgctatcaaattccatttctccgacaccgccatcaacagtaatcgttgaaacttttccactcaattcaaaacgatgacaacagatattagtgagtattaattctctgcaattaactgcaagttcaatttttccaagatatttttcaggcagaaaaactgcaatccttagattctccttagcaatggcttctgtcatatctcctaacctctttaaatcaatatcaatcttatttttaacatcgtcaattttaattttaaagtgttcttccaattgatttaaggtattactgagaagtttaactttaactttttcactctctacagcttgcatactaatttgataggcaccacctaactgaatgtcaaaatctttttccccatcaatatcatattcagtactactttcataaataaagtctttcgactggcgattagcttctttgccaaagagcaattggtctattgaaacttgaaaaaagtcagaaagagccattaaattgacaacatctggtgttcctgcacctgactcccatttggtaatagcttgtctggaaatatggagctcctccgctaatttttcttgcgataaacctaattgtttccgataatcacgtaaacgtgtttcaaatgtcataatcattttcctcctaaaaattatttgtcattaatgaacaagccaagtctaatcgaaaaaaacatggcaaacaagcaactactgataacatttgccaaaattactgctactttccgtagcatttttgaatattagcccattttacagtgttttttcacctatttctaaaaatattttttgatgctcaaatgtttctctaagctgttacaaagtaaaacattaagtgaagaaaaagtggccaatacagggtttgagccttttccttgagataagtaaaaagtaaagccataaaaaaggtcaagatggccattaaaggactgtttccaaaatgtgaaatataaagaaaatgtcccgatataaacaaaaacgataaaaaacgattcgccacttaaaagataattcttgctgtaaatagcgctgaaaaagaccgaaagtaaggtaatcctgccagatgactgacaccgttgtaaacagcaataataggtcactggtaaatcagtctaatggtaatgccaaggcaggctgatagcagctaaaattaagatgacatagagccaaaacagctgtttttgtttgacctgaaacgttttcctagtcaaatcctgatgtgtataagcgagtactactaatcccacaatattcagtagactgccggttgcctgcgataatcatgccttttcacccaagtatttgctaaataaatcatgggacaagcccacagtccaaaaagcactaactagacaagactgacaccaattaccttaactaatctttttgtcattattttagaaaacatagcatctgacttttttacatggcgtcaataaatagctcatttcgcaaatcctttactctttgcctcacctcaccgctaaattattgccatcaatataatgtgtaatgtgaaaattccaaataatcttctctaccatttactaatctaaacatatactatgctcctatctaatccatcgccttcaattctaaaaccatatcgcggatttgagcagccagttcgaagtccagcagttcagctgcttcttgcatttgtttttgcagtttcttgatggcctcttgacgttcagatttggtcattgcattataatccacagcctcctcagccacttcagagtcatttgcttttgtaatcgcgataagatcgcggatatcttttttgatggtttgtggaataataccattctcttcattgtaagccatttggatttggcggcggcggtgggtctcatcaatagcgcgacgcatggactgcgtcacagtatcagcatacataataacatgtccttgactgttgcgcgcagcccgtccaatggtctggataagaccacgttcattgcggagaaaaccttctttgtctgcatcaagaatggcaaccagactaacctctggcacatcaataccttcgcgcagcaaattgataccgataagaacatcaaaaacacctaaacgaaggtcgcggataatttcagtacgttccagagtcttgatgtcagaatgcatgtacttgaccttgacccccatttccttgaggtagtcagtcaaatcttccgccattttcttggttaaggttgtaataaaggtccgctcgcctttatcagcacgcgtattgatttcacccagcagatcatccatctgtcccatggttggccgaacttccacttctggatccaagagaccagtcggacggataatttgctcaataaccgtgtccgtctgctccatctcatagtcacctggtgttgctgaaacatagacaatctgatggacatggctttcaaattcttctcgacgcagcggtcgattgtccagcgcacttggcagacgaaaaccatagttgaccaacatctctttgcgcgatcggtcaccattatacatacctttaatctgccccatagtcatgtgactttcatcgatcatgatgaggaaatcctctggaaaaaagtcaagaagtgtataaggcggttctccctcactgcggccatccatatgacgcgaatagttttcaacgccgctagtatagcccatctcccgcagcatttccacatcatactctgttctttggcgaatgcgctgtgcttcaatcaatttcccttctgcttcaaaaagcctgacttgctctttcatttccttttgaatcttggcaatagccacttccatgtgctcatcgttagtcataaagtgagttgctggaaaaatagccaagtgatctacttcaccaagaacacgacctgttaaactctcaatttctctgatacgatcaatctcatcaccgaaaaattccacacgaaaagcatgttcatcacgtgatgctggaaaaatttccaccacatcgccgcgcacacgaaaacgtccccgctggaaatcaatatcgttgcgctcaaactgaatatctaccaaatcatttaacagttggtcgcgagaaatctcctgactgggccgcagactaaccacgctatctgcatattccttgggtgaccctaaaccataaatacaggagacggatgctacgacaatgacatcattgcgttccaaaagggcagatgttgccgaatgtcggagcttatcaatctcatcattaactgaactatccttttcaatataggtatcacttgatggcacataggcttcaggctgataataatcatagtaagaaacaaaatactcaactgcattatctgggaaaaattctttaaattcaccgtaaagctgaccagctagagttttattatgagcgatgactaaagtcggtttattgactttttgaataacttggctcatggtataggtttttcccgtcccagtcgcccctttgagaatttgcgctttctcaccaccttcaatattgtcaaccaaagcctcaatggcctcaggctgatcaccagacggctcatattttgaaaccagatgaaactggttattatctttcctatctatcatgatgtatttacctcgttttctactctctattttatcacaagaaaaagctaaaagaaaaaaagagagctgcacaaaactcttataaataaaacagagttctgtgcagctctcccataccagtcaactattatactaacaatgattgaaggctgataataaaataaaccattatttttcacagttctactattgccagacacattacagtttaaggccttttgacagtcaggtctttcttgagcaaaagaacaagcacgataattcctacaagaagaacaagactggttaataggctaccttctgtcccaaactggccgcctgagacccactttgctgcattagccttattcacaaaacgaaacagtgatctgcctgtatccatcccactaaccgcaactccaaagatattgccttgcgtaaaattccaggctccgtgaagacctgctactccccaaagattatctgttttcagcatgtacagtgccataaaaattccagataaaataatgctcataattgaaaagactgtgacgtggctattagccaaatgcatgagtccaaacagactgctggaaattccaatagctacaggcaaattactgcgcttattgataatcggcaagagccaaccgcgtgtcagcaactcttctgtcccactctgaataaaccaaaatgggataattgataagatataaagaacagctgttccagaaaaatcaataacctgcaactccacaccaccaaacagataagtcaacaaaaaagcaaaggaaaaaattcccattccaactccccatcccttgaggatttcaagaaaccattgcttcttgaaaaatcctaaactggcaattgatcgcttctcataccatttgacccaagcaaaatttatcagcgccacaaaaataaacaaacccaattgaaaaaaaatagaattaaaaaaactattagccatctccggttttagaacaatgaaaggcacactcagcaaaccaactaaaaatccgcctcctagttgccccaaaagaaaaaatagaacaaccatgacacaggcaattagaatggtcagccaagctgggaaatgttcataacggtgagtgtaactttctaacattcttttcttagacatttgtctctccttgttgttttattgaaataatacaattataccaaaccttttttatttctgcaatcgctttacagttaataatacatgttacatttccttacataacagtctatattgttcttgcttaaataatagaattctgctataattttatatcatatttatatagaagtttgtagaaaggattaacatgaagaacaaatttaaagctctgatgctgggaatcttatcagtaatctttatgtttggtgccaaggtatccactgacacagttaaaattgtatcagattcaacctatgctccatttgaatttaaagacagtgatcaggtctataaaggaattgatgtggatattattaaaaaggccgctgaaatgagtggttggaactacaaaatgactttcccgggttttgatgcagctgtcaatgccgttcaatcaggacaggcagatgctcttatggcagggacaactgtcactaaggaacgtgaaaaagtctttaccttttcccacacttactatgatacgaaaatcgttatcgctactcgtaaacaagacaagattaccaaatacagtcaattaaaaggaaaaacggttggggttaagaatggtaccgctgctcaaagttttcttgaaaaacatcaagataaatatggttacaaaataaaatcctttgacactggcgattccatgtacaacagcttagagtctgcctctgtagatgccgttatggatgataaagctgtcgctcaatacgctattaatcaaggacaaaatcttcgtattgaaatggatggcgagtctatcggaagctttgcttttgcggttaaaaaaggcagcaaatacgaatatctcatcaaagatttcaacaaagcactgaaaaagatgaaggccgatggcagctatgatgaaatcatgacgaaatggatttctgctaaatctaaaactgatgggcaaagcaaaaccaaagagactggcgatgctaaagctaaggcaaaacctgttaaaagcagctataaggttgttatggactcttcttttgcaccctttgaattccaaaacgatgctggccaatacgttggtattgatgttgaattaatcaaagctattgctaagcagcaaggcttcaaaatcaaaactgaaaatcctggatttgatgctgctctcaatactgtccaatccagccaagctgacgccgttatggcagggatgtctattaccgatgatcgcaagaaaatttttgatttctccgatccttactacacatcaaataccttactagctgtccgtaaaggaagcaatgtcgtatcctacaaagatttgaaaggcaaaaaagtcggcgctaaaaacggtactgcttcttataccttcctcgaaaaaaataaggcaaaatatggttacacactgaagtcgtttgacgaagcatcaaccatgtatgacagtttaaattcaggttctatctatgcactcatggatgatgaagcagttctaaaatatgctatccagcaaggccgcaagtttgaaacaccaattcctggagaaaaatctggtgaatatggctttgcagttaaaaaaggcagcagtcctgaattgattcaaatgttcaataatggtttagcagctctgaagaaatccggtcagtacgataaaattatcaataaatacctttctgataagaaaaaggatgctaaatcagaatcaagtgttgatgagtctaccatatttggactgctttcaaacaactacaagcaattattatcaggattaggaacgactctaagcttagcgattttatcttttgctctggccatgattgttggcattctctttggtatgatgagtgtcagtccttataagacacttcgaatcatcgcttctatctttgttgatgtggttcgcggtatcccattaatgattgttgcagccttcattttctggggtattcctaatctcattgaatctatcactggtcatcaaagcccaatcaacgactttatcgctggtacaattgcccttactttaaatggtggtgcttatattgccgaaatcgttcgcggcggtattgaagctgttcctagcggacaaatggaagccagccgcagtttagggatttcatataagacaacaatgaaacgaattatcttgccgcaagcctttaaattaatgctgcctaactttatcaaccaatttgttatttcattgaaagatacaaccattatttcagcgattggactgattgagctcttccaagcaggaaagatcattattgcacgtaattaccaatctttccgcatgtatgctatcttagccatcatgtatcttgtgattatcacgctcttaacccgcctagcaaaacgtttagaaaagaggattaaataatgactgacctaaaaattgatgttcaggatttacataaatcctttggtaaaaatgaagtcctcaaagggattgacgtccaatttaacgagggagatgtggtgtgcatcatcggtccttcaggatcaggaaaatcaacttttcttcggaccttgaatctccttgaaacagtcactagcggcaaggtcattgtagatggttatgaattgtcagatccatcgaccaatgttgacaaggcacgagaaaatatcggtatggtcttccaacactttaatcttttcccacatatgactgttcttgataatgtcacttttgctcctatcgaacttggcagagaatccaaggaagaagcacaaaagcatggcatggaacttctagaaaaagttggactttcggataaagcccaagcctatcctaacagcctttctggcggccaaaaacaacgtgttgccattgcacgcagcttagccatgaacccagatatcatgcttttcgatgagccaacttctgcccttgaccctgaaatggttggcgatgttctcaatgttatgaaagacctagctgagcaaggtatgactatgcttattgtaacacacgaaatgggttttgcccgcaaagtggccaaccgtgtgattttcactgatggcggtcaatttcttgaggatggctcacccgaagaaatctttgataacccacagcacccacgtctcaaagacttcctggataaagtgttgaatgtctaacgtgttaagtttatctgtgactaaagtcactagctaaactatgcaaagtcctataagactttgctaaacaccttactagtaaaagctctcacttaatatcgaactgagagcttttacgtcggaactttttaaatcaattctttatatctctaactgtcaatgtttgccactattgtggactgacttacacctttactaagttaaaaagcaagacattatcggtcttgctttttaactgtcggaactgtttttataaactaaaatccgtgttcctacatattatgtaaaattttatggaattttgctgatatcaatcagaagactcactcttttcttgcactttcttttaaatattggtacactaagaacaaaccatttggaggtaaggtgcattgaaaaactaaaattcttcatattggattgctttatctagaagaattttttgtgtacaccaaaatctgaaaaactgcaactaatacttaacgaaaatcaaaatgagactaggcgataaaccacaggcagtactaaaagtgatgtcaatgacctattatcttaattttcaaaaagtatagactactgctatttttgatgacataaaagaagccctactagataaagtagtggtttttattgtttgaaaaagaaaggcagattctatgttacagattcaaaatcttaccattacgcaccaaaaagatctacaaatactcgttaaagatttgtccttagtcgtcaattctggtgagaaattagctattatcggggaggaagggaccggtaagtctactctcctcaagactatactcagccctgagctgattggcaactacgctgatgtgacaggtactattcagaatagttttaaccgaatcggttacttgccacaaaacatggaagataaagatttaactctaaccattaaaaactatatttaccatgatatagattttgaccattttgattttaatcttttttatcaaatggcagagcgttttcagtttgacagtcagcgatttgacgacgatgtccagagcatttctagtctttctggcggagagaaattaaaactgcagctgctgaaaatgcttgcctacaatcctgacttacttctttttgatgagccttctagtgacttggatctgaacacaatgacttggctggagtattttatcagtcagacagacaaaaccattattttcatttctcatgatgaagcactacttaggaaatgtgctactgctatccttcatttggaattgctcaagaaacgccaaaagccccgcgccagctatttccaagaaaactataagaactacaaaagttggcgaaagaatagctttaataagcagcttcaagtcgcgcaaaaagaacgtgaggaacataccaaaaaaatggcacgccaccaccacattcatcagagtgtggaacatcaactgcgcaacaccaaaaatgatgttgcaggtcggctgctggccaagaaaatgaaaaatgtcctgtctcagggaaaacgctatgccaaggaggccaaaaacttcacggaaattccgcaggatatggatgctattaacctctttttcacgaaagttaaatctttgcctgccaacaaagttctactgcattgggaaaatcgtcctttgccgacaggacaagtaattaattttgacattcgcggtcaggataagctggttatcacaggacaaaatggaattggcaagacgcgcctgcttaaagaggttcttaccgagttaaccacaaaatcagatctatctatctgttatatgccacaaaactacgaagagttgctggatggtaagctgtctgctctgcaatttctcaaagaaagtgcgggcgaagaatcttgccgtaatcttctagctagtctccaattcacacgagatgaaatcacgtatcctgtcagctatttatcaggtggtcagaaggctaaactctttttagctcaaatggtcttggaaagcagcaatgtcctgctgctggacgaaccaacccgccacttttcaccaaccagtcagcctcttattcgacagcttttcaaggattttccgagttgcattgtcagcgtatcgcacgatagacaatttatagatgaagtcgttaataaacactacaaattaaatcaaacagaattagtgaatctagactaaaaagagaataggacagaccattgaccattctcttgactaagtcgtttcagatggtttaacttcgtctttctccttagccaatttttctcgttccaagcgtaatttgcgattaggattgagcttattgaaaagtttctccaatttttcagcattccaaacatcggctgccgaaacaaaattaccatttttatctttaaaagatatgggtttatctcccatagtaacctcctattttagtaactgacacactatttttgttgcacttcataccacgacgtaagaaaagagtttcgatcataatcatttttcgaactagtaagcgcgttaggcaagtttcatagaacttgctatttactcattactcatttaaactctgtaattaccgtaaaagtgttacgacatgcagtcaagtcagtcgatattactgacttgacataattagtaaggttggcaggcagatcatcatagtggctgccgttttgcatatcaagtactttagtacttagatatgcttccaacgttaatctacaaactcaaattcaaagttaccaatgcggacaatatctccatctttggcgccacgctcacgaagagcttggtcaactcccatgccacgcaactggcgcgaaaatttcataatagcttcatcacgttccatatttgtcatgacaaagagtttttctagtttttcaccagacagcacccaagcagcatcatccgcgcgcgaaatatcaaaggctttttcttcttcctcaaaaccataataagcttcttcttgcatatccgattcatcgtaaagcaaaaagtcatctgtctgagccagaagctgagccgtagcatctaaaagcgcatctaatccttgatgagcaatacctgaaataggaaaaatttgaggcttgtcatcaaattcaccatagttggcatctaatttttctttaaattgttcaagattctctgccgcttggggcatgtccatcttattagcaacaataatttgcggacgttctaataaacgtagattataggtctccaattctttattgatagccaaataatcttcgtaaggatcgcggccttcactagccgacatatcaatgacatgtaagataacacgtgtccgctcaatatgccgcagaaattgtgtacctaaaccaacaccttgactggcaccttctatcaatcccggtaaatcagctacggcaaaagaatctcccgacttggtacgcaccatacctaaattgggaacaatggttgtgaagtgataggctccgattttgggtttagcagctgtaataacgctgagaagagttgattttccaactgaaggaaaaccaactaaaccaacatcagccaaaatttttaattctaaagccaattcccgctcttcgccaggttctccattttcggaaatctctggagcagggttacgaggtgtcgcaaaacgaatattaccgcggccgccgcgaccaccatgagctacaataaactcttgtccatttttgaccaagtcagcgataaccttacctgtttgagcatcgcgaacagtggttccctgcggcaccgatacataaagattttctgcaccacggccatgcataccttttgtcatacctttctcaccagctttggctttaaaatgacggttataacgaaaatccatcaaggtgcgcagaccttcattaacaacaaaaatgacatcaccgccacggccgccatcaccgccccaaggtccgccattagcaacatatttctcacgtcgaaaggcaaccattccatcgccgccgcgaccagccttaactgaaactttggcagtatctaaaaacatactcatattctattttcctattcaaactcgcttaaaaaaacgcccgtaagcgttcctttttaaataacagcactgagtgcactaagaacaagcgcgccaacagtgactaaaaccatgatgataacaacaatcaaagtcaatttttcaaacggtgttttcttacggggaccattatctccaaaagccaattttcttacctcttttttatatttatagcttatttttatcttatttatattatcatgaattagtctaataagcaaataacaaatataagtcacgagactgctatcacgattcaactatccgttctagctccatctgtatatatatactaaagggcaataaaatatgtgattccaaagcttcaacagtaacctttaatgggaatatagaatttataggaaacgcttccaaaattattgtgatttcaaattaaatatgttaaagttaagctaataaataagcaagacattactgttttttctctacaaataaaaggaggcaactatgtcaatttacagcaaatcttatgtcaccactccccaacactcagctatgaattggggttcaggcagtcttaatgttttatcaactcccagtatgattgcttttatagaaaatgcaacttttctgtactgtgaagaagatttagatgtgtcaaaaacaactgtcggtgctcaaattactgtccagcatttggccgctactaaaattggtcaaacagtagaagtcaaaattttagctgttgaaaaagatggacatcacacccatttccaaatagaagtttacgaaggagataaacttatcggtaagggtgaacacacacgcgtcactatcaatatcaaaagattccttgataaattagaataaagacatgcaactagagcattctagcctctcagattgaagaaaaaatttttcctttaattaatgattcagatagtaagtgaaattagccagtggatgatttcagaaatctagagaattccatatctaaatcaagatacaaagagcgttaaacggacaatagcaaaataggaaactaaccaacgacgcttgcgtctagggtatgtttatctttttgcagccgtccgtagctcgtgttcagttagaatttgatcctaaagtctcaaatatttcaagtagcagaaacactaacgcttctgctacttttattatggaggaaagtctcgtttagaattcgctctgcccgcaaatagagaaaattaaaatcaaaatgtgcagagccaaaaaaattttacggtgaaaaataggcttgactctattctactataactataaaaaaatcaattaaaatttttcgcgttcttctcaaactgaagaccaatccatttgataaaccttacggtataaatcaccaaataaaccgcggtagccaatatcttttcctttataagttaaggacaaaacttgataagaatctggtaaagtgacacaaccactcagtgaaagcatgaattcttcaatactgttaaacgaagctttcttttttgtttgataagcatctaaataagttaatacaatcatcatctattcctcccatcttacaaattattaaaatatcttattttattgttttaactaattgttccaaagaagttgctggacgtccgagaacacgttcaatatctgaagaaaccccagcttgctttccttctttaatagctgtataagtactaacccaagcatcatattcccagtcttgtgctggccaagctttacgagatgcataagcttcttcaatgctctcatcaatataaggaatgatttcacccttttgctcactgacaaaatgaacaatatcagccattgacaaatctgccggaccagtcatgttcaacagctgatttttccatttgtcaggcttagctagaatagttgtcgccacttcagagacgtcctgacgagctacagcagaaactttaccattaccagctggaccgcggatctcaccattgttcagacacaaatctaagaagaaatccagataaaaattatcacgcaagaaggtgtaagtaaaacctctttccttgatatatttttctgtcttagcatgatcacgcgctaaagtaaaagtagcttcagtagcagcattataaaaggatgtgtaaacaatatgcttaacacccgcttcatgagctgcatcaagaaaagcaaaatgctgctgcaaacgattgggactttctgatgcggataccattagtaaaacatcaataccttttaacgcttcaacagtctctagagaattttcaaaagcagcctgcacaagttcagcattatcatataaagctgctctttgagggtttctagccaaatgtctcgctgagatgccttgttctgaaattaattgagcaactttactacctaatttccctgttacgcctgtgattcctatcattattatttcctctcttttatctaacttaattttaaaaacactgagaatgcttaatggacgatatcagttagttctagctatttcagcctttactgacttaatgctgctaatttatcatagaaatctggaaaattctttttcagattaacaaagcgattttctagagtcaaaaagctatgttccgattgtgcttgacagacagttttccctttttgattaatcatttgataactaagagtaagtcgggcagctttgaccttttctacttctacgctaatgctaattgtatcagcaaaggttgaagttgctaagtaaatacaatgaactgcagttactggtgaaataatgcctgcttcctctaatttatcgtaaggccaaccaatttctgccaagaaatgaacacgggcttcttccatccaacgaatataattagaatgatgggtaatccccatacgatcagtttcataatattgaaccaaatggtgatatgctgtcatgttagcttcctttcataaataacaagtgttctgttaatatgctttgacttgtagccaatcagcatcaagagtcagtgtctgattttccaaaaatgaccgaaagaattgtaacgtttcttctattgggacattgggctttctatagacatagcccttttttaaatcagccgttcgatattcaataaggtaagaaccatcaaagcaaagtgcctgaataaaggaaaaatctccactgacactggtccaagacaaggtgacaaaaccttctggatcattactgagtgagacaatagcttcctcaacttcttttgaattagggtttaagaggtcacccttttgacttgtcaaagataagccagattcgaaattttgaggagcctgcgtttttttaaaccaactaaacaaagacattacttacctccgcttcgtttttaatgcttttttatacgaataaagtaaaaatgatacagccgtattatctttctcacataaaagtcttaatcatccttacgtttacctgtcacaaacatggtgaaagttgcctttgccacttcttgtttcaactgattggttactgtcacatcaaccactttcgttgttcgaccgtcatgaacacagcgtccatcaattagtaaagtatcacctagcttgccagattttagataattaatactggactgaagtgttaccgcatcaaaaccagtagaaattgataccaagccgctgatttggtcacataaggtaaagatataccctccgtgtgcaaaaccataataattcaaggatttatctactacctccgtagtcacaatcacatgacccttttcaaacgaaaccatatcaaaattttcaaacacgcgaatttcgtgtaaatggttatcactcatcccttttcctccctcttatttaaatctgttactattataccactttccgacaaaggactagctgcatcagcaaatcaaaatgagaaagcattcttcttgcttgctgacataatagctaaaaatatgggcagacactctttatcagatttactcttacaaactgtctcaatttcttagctaacatgatctgcttgtttgctatcgcctttagcaattatctatgatttttcactttaaaaattaaaattatgactccagtcaacaaaaatacttatttttcttcctttttgccttttaacaaaacaacagatacacttgctgctccaataccaagcatcatcaatgcagactttatatctaatcttcccaaaacggataaaaccactactgcaatccccatagctgttccaattcctttcagcgcagtatcaataatttcagttatttattcttaccaatagtttcttttgtatttgtcttaacttacattaaatcatctactgacacttcaaatatttctgctaatttgggaatagaattaatatctggaaaagataaatctctttcccatttagaaacggctttatctgtcacccgcattttttcagctagttctaattgtgtcatcctttttcttttctcaatgatgaaatcatcataccaagcgtttgttttctcatcagttccctcctccttctttttagcaatgatatggtaacatcatcttttcatacactcaaccaacttacagtttacttttctcgacttgtaatttatctacagtttttctgtcttacacacaaaacaggtcaggttaacttatttcttggatgatgtcgttccatagtataataggaaatgatagatgactcccccaccccgatctgtcaaatgataatagacatagtttagcatttcccgtagtcgggaaatattcctttgaactcgtaaaaccatgaaaaaataaaaccactttctcacaccaattgtttaattttacatatgataatgttttaccatctattatttctatctcttgatgaaacaactgccttcctcctgttagccaaaattgatacgtgttaacctatcaacctataattggagatacagtacaaattctgacttcacaggcattatcaagattccacattcatttttatgaaatccttgaactcaaaaagcgcatctctgctatagatctgcgccttaactgtttattgtaacttaggattaatactattaggcatcattcttatattaaagcaaagaaaatgctattaatgagctagaaataacatttcctactccatgaatgcaccagcttggcaatattgaaccagcaaacttcttttcagtaatatatcctgaaagccatccaaaaagacctgtaaaaagagtgattataattgccaatattactttaccagccaagaaaagaaagatgctatgcatgagtccaaagagcagtgcttgcgttgtatttcttaatgcaaatcccaagcggtttgaaaaacgctttaacaagaagcccctaaagaacacttcttcgagaagagacgtattaaagagggattgtaccaatatagcaggaagagcactcacacctcgtcctgaaaattcaaacattcccattgaagctccctcaggcattaaaccattgatatttttcagtaaattgaaaccaaaaggccccactaataaagtcacggctaaaacacctaagatgattaacaaatcactgctatttagtttatgttgaatcttttttaagccgagccaattaaagaaagaagccgttttcctgccaattaccatccaagtgataaacggaatagtaataaaaaggacaagattcgcaccgctcaccatcaattttgaaacaagtaaatccatttcatatcctcccctaacattcaataataatttaaagcaaaccagataatcttattttacagacaatcataccttattacattttacttctcacttcaaagaatagctgccaaaacaacagactaatcactcccgcttatattatagcataaaatattatgcagaagttaggattatataatgcagcgaaagtcaaagttcagcaatattgcagcatcctatactaacaacataacttgagagtgacattaacaataaaaattaaacggcaacttcctaaaattagctctaatcacctttcagaacgaaaattgaatgtgagatagcgccgactgactaacaatctggataaggagataaggaaatcacaacctttctaaatttcaattatcaaactatcaaaaataatcactttggagaacatattaaaaccgtatggcgtatagttatacggttttaatgctcacttttacactgcaaaaagccttggtttcaaggcttttcattgctacgatttgtcaaaggtttctaagctttcacgagcaaagctacgcactccacatgatgcgtttgcggaaacaaatccaccggctggactttgacaagtttgtaccctagttcttcataaagtttgacatcacgcgccatggtggcgggggcgcaggagatgtaggtgattttgcggggctgcatagcagtgcttgctttgatgaaactttctgtcaagccttttcgtggtgggtcaaccagaataacgtctggtttgatgcctcgcttactccagctggccatggccttctctgctgagtctgccacatagtggacgtttgtgatattattgagcgcagcatttttctcagcgtcacgcaccgcagcttcaatgacttccactccgtaaacatccttgacttttttagcaaaggacaggccaatagttccaattcctgagtaagcgtcaatgacggtatcatctggtgccagatctgaaaaatcaatagctgtctgataaagtttctcagccatgacggtattgacttggtaaaaagattgggcggaaatgatatagcagttgcctagcatggtatcttcaatggtatcttctccataaagcgttctaaattctgaaccaaagatagcattggtatttctatcattgatgttttgaataatggatttgaccgctggaaattcagagacaatcttttcaatcatttgctcaatacgaaagatttttgaccgtgtcgtcaccaaaaccagcattatttggcctgtataatgtccacggcggacgacaagattacgaataagaccagtctgctccttttcgtcataaggtttaagatcaaagcggcgcagcaaatcacgtgtgaagttaatcagccgatcaatctctttatcttgaatgtagtaatcttcaataggcatgagagcatgagaatttttgcggaagaatcctgtttctaactgaccattgacacggcggacaggaacctgagccttattgcgataggcagttggattgtccataccaagtgtatctgcaacttcaatgtctgaaatgcctgcgattttagagagactattgatgacctgcttgcgcttgaagttaagctgctgtccgtaagtcaaatgtcccaaatcagcaattcctgtccgtaagtagtctacagtcagattatcactgcggtaagctgacttagctaaatagctttcaacttttccgaaagcaatgttctttttgaccttgagcacgcgcatgcggattttctcagtcggcagagcattgtccacaaaaaagaccaagccatcaaccttggcaatacctgcgccatcatgactgagatcactaatctcaacttctacaatatcattcttttttaacattgttctcctatataaaaagtgcacatgaacttcgaaaataatggcacctcattctttagctttctcattttcctaattcttaagtagataaggcctattgccttagccttagtgctgacatttcacaaaaatgaggagctgagaaatgctcaactcctttattatatcatattaacgaacgcctaaatgggctaatttctttttatacttgtcaaagtcaatagacagagcctgaccaccataaatatcataatcatcaatccaatccccattatcaggaacagtgacctgttcaactttcttgccattggtcaaaacggataagccatgactcaagagaaaaccataagaaatattggttgatgtcaaagcataaatcttacctaaggcagcagaacctgtaaagagcttggttggatctttaatttgagacatgattgccgacataacctgctgctgacgtttcgttcgtccaaagtcgccttcatcatccttacgaaaacgggcataattcaacaaagttcgtccatccatcttttgcttaccaacagaaatcgtttgattaggaacaacaccatctttcatattaagatcatctggtacctctactgaatcaacggcttcaccaccgaccgttgcaaactttgcattaatttcaacaccattagggaaaagcgtatcaatggcctcagcaaaggtttgaaaatcaaccatgacataatatttgatatctatatcaaaattacgcttcaaggtttgccgcatcagctcagcgccttgattgttatcttgttcaccaatattaaatgctgaatttaatttattgtcatatgagtaattatctgcgctgacccctttaatattgaccaatgtatcacgcataaaactaaccattttaatcttcttgtctttattaccgacatttaaaaccataatggtatccgtccgcgcttctgatgacccttgtgtaatacgctgatcgcttcctaacactagaatattggttccatctttggtattctttccattaaatttttcaacaacagctggtttataatttttatttttgccggaagaaatatcattcatgcctttgataaacataacaatcataccagcaaaaataactagcaataacaagcaaacagccttcaaagtgcgcttaacagtccagcggcggcgctttttaggcttagttgccgaaacggaatcttttctttttccttgatggcttttcctttgagaacgtgtggattgttgctcaggataaacaggcaatccttgatcagtataatgactatttgcataataatcatcccactggtcagcatcctgataatcatcttcatagttattatcataagactgctcataatcttgataatagttatccccaggttcatcgtaatagtaagaaggcgtctcttgaatttcaaccttctttttaagatagtcgaattcagcctgctctcgaggactgaggtaggctatatttcttaagaggtactcatagcgtaactgctcgtgacggcttactttccccttattgtttctgctcatgttttaattctctaacttatttcttctgatacttatctattcttttaaagcctgtaaacggcatacttacccaaaattttataatgaattccaatacttgtcaactcttctagtgcaaaagaaactaatttttcattatgattctcaaaatcaataataaagaagtattctccaagaatcgtttttaagggacggctttcaatttttgttaaatcaatccctcgccaagcaaaagtagaaagggctttataaagcgctccaggtaaattatcaggaagcgttaaagctaaagaaattttttgatcctcctcttttagatgaatagtgggggtttcatcccctaaaacccaaaatcgggtataattttcatcaatttcttgaatatctttggcaataatggataaatgatattcatctgcagcagcatacggtgcaatggctgcataattctcttcaggatgttctgccacaaaacgagcggcataggcagtgctggcagtcatttcaattttgacatctggatagtgagaacgaatatactgtttgccttgagcaatggcttgaggatgcgaaaaaattgtctcaattgttttatcagcagaagttgacattagctgttgcttaataggaagaataatttcagcgactgcttctatttttgcctgatgaaaaaggtaatcaaaggtttcatgaacactgccttcaatagaattttctaccggaacaacggcaaaacaaacctgtttggactcataagccttaataacttcagtaatattttcaaaaggaagcaaatctgccgcaggaaatgcatgcaaagcgacattatgagtaaaagagccgctaggccctaaataagcaattttcattttatttcctcaacaatttctcggggtgttttaccagcaacatcaataataatattagcggcttcctcatagagagcctgtctgcgatcgaaaatctttttaaattcctgacggctattattaataaaaagtggccgaacgttattactgtctgcttcaattcgcttacaaagagtttcaaaatctgcttttaaataaattgtttcaccattttttgccaaaatatcacgattgcgagcactctcaacaacaccgcctccagttgatacagtactatctgaatcagcaagattggataaggtttcagactcaatttcccgaaaggcatcctcaccttctttttcaaaaaatgctgcaataggcattccaattttctcagttataatatcatccatatcttgaaaatccgggtctaataaacgggaaacagttgattttcctgcccccataaaaccgattaaaattttagccattcgttatcctttctaaatcactaaagaaagtagggtagctggtattgatcgcttcagcacgctctaattcaacttctccctctttaaccaaaagtgccgcaatagccgtcatcataccaatccgatgatcgccaaaagtattgaccttagcaccatgaagattggttttaccttcaataatcatgccatcatctgttggagttatcttagcccccatagcatttaaagcgtctgctactacttgaatacgatctgtctctttaaccttgagctcttgggcatcataaataacagttcggccatttgcctgtgttgccaaaagagcaataataggcagttcatcaatcagccgtggaataatgtcaccgccaatttctgttcctttaagattagaactttcaacagtaagggtcgctgcttttgctaagtcatccctatcgctcagttcaactttaccacccatagcttcaataacttctaaaatacctgtgcgtgtttcattaatgccgacattttttagagtaagcttactgtttgaaacaataagtcctgcagccagccagaaagccgcacttgaaatatcaccagggacaataacattctgtgctgtgaattcctgtccacctgaaatgcggatttctttgccatccacatcaagatgacctccaaattgtttaatcatatcttctgtatgatttcgcgttttctctttttcaataatgacgctctcgccagaagcttgaagagctgcaaaaataagagccgatttaacttgcgccgaagcaacaggaagttgataacggattggttttaatctttttgaacctttcattgtcaaaggaggcaaatcgcgctctgtccgccccaaaatttggactcccatttgacgaagaggaaccgttaccctatccataggacgtttagacagactgtcatccccaaacatttcgactgtaaaatcttgtccagctaaaactcctgaaattaaacgaatagacgttcctgaattacccatatcaagagcttttttaggagatttgagaccgtcaaaaccacgaccgtgtatctcaacgaaatcatccttatctttaatttcaacacctaagtcacgaaaggcctgcattgttgataaaacatcctcaccgcgtaaaataccatagattttcgttatcccctttgccagactgccaaacataatcgagcgatgactgatagacttatcgccgggaattttcaatgttccgctcagacctgaagcatttgttcgtaatttcatttttctctccattgtttattttctctattttaccataactggcaggaaattttagaaaattctttaacattgcttacaaaaagagcttagaaaaacgaaacaaacgtttccctaagctctgaaattttcctaaacgccgtaaagcttttgctacactcacaatcatttggcaatatcttgtaaaggtgaaaaaataatgcgttcgatatcattgacataaaccccaagagcttgttgagctgtagcatattcttttaaaagtggattagcttcaattttttgattaaaactttgcatttccgtttgaacctcaggagttggtgcttgtcctgtttgtatgaggccttgaattttcatttgaaattctgtgaattcagtccacaatttcttagcctcttcatcctcgtcaatcttagcctttgcttggacaagggcttgatattctggtaaagcacgaataccgcgctccaactcatttgctaaatcatatacatttactgtcatattttctcctttaatttaaataaacacgataattagtatttttacgaatcaattcctgagcacgttttaaatcacgctcatttttgaaagaaatctgtaagataccattaatatcttctcggttctcttcattgatatgaacattgaccagagaggttcctctcagtaattcgaggatttccaaaataacattttcttcatcaggaacatcaacataaatatcataaaagctatcgacaccagcacgcttatgaatttccatatttttacggatttgccggctttgattaaaaaacgcccaaatagcattttcatctctagccttaatcaaattagaaatctcatctagacgctgcttaaaattttcaatacgatctaaaacggcctcttgattggtcaaaagaatactagtccacatgccgggttcactttcagcaatacgggtcatatcacgaaaaccacccgcagcaaaatgcttggtcatttcatgactttctgaaaagtcaccggcctgcttcataagactcgaggcgataatatgcggaaaatgactaatttgactcgtaacgcggtcatgttctgccgcatcaatttccacatacctagcatgcaagcctgataaaagatcctgcaaggcaggaatagtattaggtttagttagacatgatggtgaaaaaatataatatgcattctcaaaaagattgacatttgccgcaacagctcctgatttatgacttccagccataggatgactgcctacaaattgcacaggcttatctttaagataatattctgcagctctaacaatttcatatttagtagagccggcatctgtaataatgacatcttcttttaaatccaaatctgctaaaattttgataaaatcaattgtttttttaataggtactgccaagataatgacatctgccaaagcagcaaatactttaaaatcagctgtcgcctcatcaacaattccgcgctcaagtgcaatatcacgtgacctatcagaacgattgtaaccaacgatcttataatgaggatgatctcgttttattcccaaagcaagcgaagcaccaattagtcctagtcctgcaatataaattgttttttcttccatattttctccactataagcccatgcttaagagaccttttctactgtgtatggactcctaagtctttaaaattctttgataaatttttgatggcttttcacagcttcttttagctcttccatattatctgaagaaaacttattcaaaatttctgttgctaaaactgtcgcaacgactccttccataactactgcagcggcgggaacagctgttgggtccgaacgttcaacactggccttatatggttcgtgtgtttcaatatcaacactcatcaaaggcttataaagtgtcggaataggcttcataaccccacgaacaacaataggctgcccattagtcataccgccttcaaaaccaccaagattgttagacttacgcctatagccatcttctttagaccaagtaatctcatccatgacatcgctgcctttgagataaccatccttaaagcctaagccaaattcaacacccttgaaggcattgatggaaacaactccttgagctatttgggcatctaatttgcgatcccattgaacataagagcctaaaccaactggaacaccaccaacaacagtttcaataataccgccgatagtgttgccttcttttttaatctgatcaatataatccttgatttcttgctcatgttcttggttaacaacggaaatttcagattgacttgctcgttctttaatctcagctactgtcagattttcaggaacatcaacttcaatgccgcccaaaacaacaacgtggctagcaatagctatctcaagttcttctaaaagacgtttagctactgatcccactgccacacgcatagttgtttcacgcgcacttgagcgctccaaactgttgcgcaaatcagaaaaacgatatttcataccaccaaccaaatctgcatgtcccggacggggtttggttaattttcgaattgattttttcttatcctcaatatcagcagcactcatgatttcagtccaatttttaaaatcacgattagtgacattgagtgtaatcggacttcccatagtcaaaccatggcgaacacctgaagtgatttccacttgatcagattcgatcttcatacggccgccacgaccataacctccttgtcgccgttttaattcagcattaatatagtcggctgttaaaggaaggcctgctggcactccttcaacaatagctgtcagacgaggaccatgcgattccccagctgtaaaatatctcatctcacttctccaaatactctttcatttcttctaggctgatttgattgatagcagcctgtcctagttggggaacaacaaccatttttatcatttgaccacgcgtttttttatcatgctttaatgcttggtacataggttcaacattccacggactatagtcagtaggtaagccaaatttcaaacacatggcctcgattttttctgttattccttgcggcatgagtccttttgtctcagcaatacgcgaaatctgaaccatcccaatagccacggcttcgccatgcatcactttgccataacctgcagtcgcttcaatagcatgaccaatagtatgaccaaaattgaggtaaagacgaacaccattatccaattcgtcctcaacaacaatctgacgcttcacattgcaagaatgataaataatcttttcagcattttctaaaatagagtctgttgaaccatctaagtcttttagaatttcccataattcaacatcagcaatcaaaccatatttaataacttcccccataccttcaataagttcacgcttaccaagtgtattgagtgtatctggatcaattaagacaccatctggctgagtaaaagtgcccaccatgtttttcgcaagaggcgtattaacacctgtcttaccacctatggacgaatctacctgcgctgtcagactggtgggaatttgcaaaaaatgaatgccgcgcatataagtcgaagcgacaaatccagccaaatctccaacgacaccgccgccaagagcaatgataccatcgcttcttgtcataccttgtttgagcaaaaactcataggctttattgacagtcgtcaaatttttactggcttcaccttccaaaaagtcaaaaacaacaatttcaaaaccagcatcttcaagaccaagtttaactttttcagcataaagactacctacacggttatctgttattaaagcaattttttgtggttgccaaagttccttaacccattgtcccacttttgacaaactacctttttcaatgataatatcataaggtttacgaggaagattaacgtttaatttcataaaatcacctgttttatttagacttgtattttttttctagagcctgccagatttcctgactcggcatttctttaccagtccaaagttcaaaagctgcagccgcctgaaaaagaagcatgcccaaaccattcacagcctttaacccacgactgcgtactaagcgtaaaaatggtgtttcaaaaggttgataaatgacatctgcaaccataaggtttggtggaaattcaaaactatcattaataatcattgatttgccatccataccaacattggtcgcattaacaaataaatcagatactaatacctttttttgaatcatgtttaagtcctcaacaggaaacacttcaatagcagcgcctgttttacttgatatttgtttagctttttcttttgtttcttcaagaaaggctgtttgattaaaaatattaattttcttagcaccattgatagctgcttgtgcaataatggcagttgcagctcctccgccaccaagtatggttatgaccttatctgcaacatcgaaatctgcaaaggttcccaaactcttaaagaaaccaaaaccatctgtattgtaaccgatcaatctgccatcacgattaacaatagtattaacagccccaattaaatctgctgctttcgttacttcatcaagataaggaataactgcctgcttgtaaggcatggagacgttaatgccaaacatatcataacgcatgatattttctaaagttacttgcagttctgactctggaatatcccaagcaacataaacaccattgacaccagttttttcaaaagcgtagttgtgaataaaaggtgagatagaatgtttaattggtgtcgcgacaacagctgctaaacgtgtataaccatcaatttgcatctagaacctccttaattttacgcatatctgccaaagaaatctgtcccggagcgctttcttgttccaagctggcaaaggtccacgaactgcctattaaatcagctgctaaacgtgatatccgacctagtttcgacatagacatagtcacatattcctgattgggatttaaagttttaaagcctcttgtatagttcatcaaatcaagaacatcctgttcatttttaggcatgacagcaatcttgacaacacgcggagctaaagctgttaactctgaaaagacttccattagattttctggtgtttcttcaaaattgtgataagacaaaataagatttgaaaaatcatacatttcctctaaaacatcacggtaggaaaaatattcaaagtcaatgtaatcaggctgataaagagccgcaatatcacggatgatagcaagatagtcttcattagaaagggaaatatttcctccttctttttctgtacgcaaagtaaaaatcacttcatgacccgagaacttttcaaaaatagccggtgctaccgttaaaatatcatctttaactaaataatctgcccgccattcaataatatctgtactatcaatcctcgttaaatcaagttggttagcctcttcaatattttgaggcataacaggaactactattttcatatacacctaaacctttattgtaaatacttttaaataattgctgctttcgtcttgaacatttactgcaaaatcacttggcaattgctgtaaatcaagataagtatgcttttgttttccgaaacctttttcgatttgttttttaaactgagaaactgtcatattagctgcattcgttgaagcaatgataagaccgttttcagataaaatctccaacccctgtctaattaacttatgataatctttggaaacagaaaaaacctcttttttatttctggcaaaactaggaggatcaataataataatatcataggttaagtgatgacgcctagcatatttaaaatagtcgaaaacatccatgaccactaattgatgatttgccatgtccaaatgattcgcctcaaaatgagccaaggacagagctcttgagcgtttagccaaatccaccgaagtcgttgccattgcaccgcccatagcagcagcaacagaaaaagctgctgtgtatgaaaagagatttaaaacagtttttcccgcagctgatccattaatcaactcatttcttacttggcgctgatccaaaaaaatacctgtcatgagtccatcgtttaagaagacattataagatatcccattttccaaaataagaaattgttctggtgcttcttgaccataaagatgagcagaaacattatcaatccctttgaatcgaatcttctcataggcacctaaaaaattcggatacacttgacgaaaagcagctacgatctcatctctaatctgataaacaaaagaattgtaccaagaaaaaagcacaaaatcaccatagcaatcaattgtcacaccaccaaaagaatcaccatcttgattaaaaagacggtaggctgttgttaatttagaatgagcaaaattttttcgcttatctttagaccattgaaataattgaataaaataagtcacattaagtgatacttttttaggtgagatcaaccaaccaacgcctttattttgctttgataaataggctgttcctaaaaaaatatctgcgtcagaatataactgaacaacttgattatccaaatttaaatttggataatctctgctacttaataattgcacccctcgtttaagttttttctccgcaaaagaacccaccataagtttaatcatatcaatcattataacaaaaaattcagaaaatttctcccttaaaaaaacatttctgtcatctgccaaaaataaaattatgttataatcaaataataagattttatctcttgaaaatggtaaggaaatcatataatgaaaaaaatcgctaaatttctcttaagcgctgttaatacccgtttagggtttattttaacgcttgtattcatttattggctaaaaacaatttgggcttataatgttgattttagtttagatttagacaaatcataccaattttttttgacactaataaaccccattcccattagtttgttgctgttaggattggcactttatatcaaaaatacacgcatcttttatttcactgcgattgttatttatactctacttaatattcttctcattgctaattctatttactttcgagaattttcagactttctaacagttagtgcagcactagcaagcagcaagacttctgctggtttaggggcttctgcccttaatttattgagaccttgggatgctatctatattctagattatgtcattttaatcactcttttttctcttaaaaaactttcttttgaccaaagacccttcaacaaaagagctagctttgctatttctgctctctcaggtctccttttttctgtcaatcttttcatggctgaaattgatcggcctgaattactaacacgtgggttttcaaatatttatgttgtccgtgctttagggttgccagcattcagtgcctacagtgctaatcaaacttaccaaacacaaaaagtacgctcagaagcaactgcttctgaattcaatactgttaaaaaatatgtaaaagaacattatgccgctcccaaccctaaatactacgggcttgcaaagggtaaaaatgtcattgtgcttcatttagaaagttttcagcaatttctgattgattataagctcaatattgatggcaaacaatatgaagtaacaccttttttgaattcactttaccattctaaggaaacatttgctttttcaaacttcttccatcaagttaaggccggaaagacttctgatgctgaaacattaatggagacatcactctttggtttaaaccaaggctccttcttcgttcaatacggaggtgataatacacagcaggctgcaccgcatattctaaaggataccaacaattacagcagtgccgtctttcatggtaatatcggtactttctggaaccgtaataatgcctacaaacaattgggctatcaacatttctttgatcaatcttatatgtcaaaaatgactaaggacaactctttccaatatgggcttaatgataaagttatgtttgcagattccattaaatacttggaacacatgcaacagcctttctacacaaaatttatcaccgtttcgaatcactacccttatcaaagtttagatggtgatgatactggctttcctcttgccaaaacagaagataaaacaattaatggctactttgctacagctaactatctagatgctgctatcaaagatttctttgattacttaaaagcctctggtttatacaaaaattccattattgttatgtatggtgaccactatggtattgctaattcaagaaatactgatcttgcaccacttttaggcaaggattcacaaacttggactgaatacaacaatgctatgttacagcgtgttccttatatgattcacgttcccggaacagataaaggatttatcagtaacacctatggcggagaagttgatgctttgccaacactgcttcaccttttgggtattgataataaaaattatattgaactaggacaagatttactatctcctaacaacaagcagcttgttgctttccgttccgaaggtaattatattacacctaattatacaagttacagtggccgtgtttacgacactaaaacaggtgttgagatcacaaatccagacgaagcaacgactgctaaactgaaagaacttcgtgatgcagcagacaaacagttaaatacaagcgataacattcaaacaggtgatttactgcgttttgataaggatagtggtctaaaaccaattgatatcggttctatttcatataaaaaggattctctgaagaaactaaagaagattgaaaagaaactagataagaattcaaccagtctttatagcaaaaatggtaacaaatcaactcaagatttatacaaggcaccaagttataaagaactacacccagaagaatcatcaaaagaatcctcaacaactacatcatcaaaataacaagcttatccaaataaaagaaactggaaattcctaatctaactttccagtttacaataaatataggttggaaaaatactgaaattatagtaattaaacgttttttaccctatcactgattttatgagaaacgaaaaagcaatcgtatgtacttccgccaagccacacacgattgccttatatattgtctcataacacaaataactatttatgtgaccttcagccttcaacccaaatcaataaagtcttcttctatcgctaagggctgcacttgtccacctactgcaataatagtctttctttattagtttgcatattttaaacgcagtattctttcttgatttttatctagccgaagtaaaataacgaccttatcaatactaatattactttcaagcaaacgttctgccgccatcattaaaccattgttaatccccaactgtaaaataggattagtataatcattagcgtcaaaaataaatttatgactaggtagatcaaacaaaactttgactgcaccgtaaagctgttcaaaagaatcaatctgcaaatcaaaaacaggcttcgttccagcttttaaacgacggccacggtgattaaaccacatagaatgccagccactatcatgggctcccttgatgtcattatcataagaatctcccacatacaaagtggtatctggattcatttcaaactgctcagcagctaaattaaagatttccttttgaggtttttgaaaacctgttgcctgactgaccaagacacgcttaggatcaacataatcataaaggcctaacttcttaactttttttaattgatgctcagtcggcccatttgtaatgactcccatgggaatattcttttctttaagaaaatccaaagtcaagcgcatctcatccaacatgctaatctggtcaagttctttttcatagatttcttgaaaatactgaccttcctcttcgccaatctgccgataatcaaaatccaacaaggttttttggcagcgccagaaacgaaaatactcagttgtccattcattagccataacacgtggaaaacctgtatcagagtagtggcggaaacggatataagcctgatttatatttgccatatcaaaatcagggaaacactttcccacggcaattctgtatggtgcctgttgatcatagatcgtatcatcaacatcaaaaacaatcgcagtaatcataagtttatctttctaaatcttaatcctcaaaaattatactattttttagagaattttcaaagtttttctaatttccttaccatattatcaaatttccccttttattaaaaacattattaacactttttggctgcggtcacaatcaattatcttaattaatacctgaagatactcaaaaaggacttagttttcaagtcctttatttttctaatcaatttgtttaaagtacattttttgtttgacttgtccttgaccagcttcagaaatctgataagtaaaactataagaaatgaatcgctttccataggccaatatactattgtattgccattgagaaagctttttaccttccactttacctaaggtcattttattgtcatttgctttatacttccaagacgcatttttactttgagacttataggtcttatcaaactgtttctcactttgaacagccttcaaggcaagtgtcttatcctgtgtcacaatgactttatcactagtgctagaaaaggcgacatacatcacacggttattttctttgccctcaaaaacactagaatattgataagcatgacctggaatcattttagcaacatgatggctggcatagtagtaaaagctacctccagcaatggctaagacaagaaagactgcaataataatctttattaatttacgttttgtcatcgtttcctccactattttaataatcagaagcagcatcaattgattgtgtcgttgcatttgatgattggttagcatttgaatcagttgattgttcactggatattgttgaatcactgttcttatcattatcgctgtctggactatctgtagctactccgtttttgtcttttgatgaactctctgtcgttgatgtttcagatttgttataaacttttaagttaaagaggaggcttgtgttattttctttttcaacatctaattgaacggcttgagcatctattaattctgttagataatcatcttttattaattgattgtaaatttttttagcaacttctttagcggatttttcagtataagtgacattgtctaactgcacctgttgctgttggtcatacaggactttttcttctaaatcttctgttttagcggtgattgcttcagcatctgctggatcatgtgagagaaaagtaatcttaccttcttcaacttttttatgaataagtttattaatctctttttgaacaacatcttggtaggtatcttcgtctaatgctttttcttcagtgtttactgattttttattcgaagaagctttgctattgtcttcagtctttttcttagcaaatgatgaatcatctttagaaattgctgaatctttctgagaatcactattttcattattgtcaacagaataattatgtttgatatgattatcagcataataagaagtattattgataatcacaacgctattatcatctccataaaaataattaatattaattgaagtatgagcacaataataacctgtacctttataagtataacttgtaggaactttaccatcacggttaaggattaaaatatctcctgcatagatcaaatccacattggtaatattattatcataggccagttttttaatagagatacctgttgcttgtgaaattccccaaagagtatcaccccactgtataatataacgttcaccatttaaatgattgacattgatgttttgagatgagatgttgtggttgatttgctctggagtattagctacccaattggtgatatcagcacgttgagcgttagtttgatcggcataaaagttattggctactgctcttgtttgcactactattggtaccataagagcacccaacatgacaacacttgtccaaagatgttttttcttcatcaataatcctcctaaaattaccatcagttacttttcatcttagcattaatatttttactaaaattaaaaaattggcaataattaatataagatttcgtaaatattacaattcttttacttaattatacgatttctatgctcttattgtcaactgattttttattctttatacattttaacgctctttgtttaaataaaatgtttgtcaaccaccatatttttaataatcattaatcatgattcatggtttagctcaagttcactacagttacatgttctcatgatccattaaaggacttttaacatgacaaaataacagtaaaacatgtgacgcgaaaaccttttataacaataacttttaattagaatagataatattcttttgaagacgaagacaactaatgccaattttcatctgtaataaagcgtttttagtagattttcctatatcacatgtctttattttatgataaaatagataggaaaacttattggaggaaaacatgtcacatcaacatacagaagaattgaatgaccaacaaattgtccgccgcgaaaaaatggcggctttgactgaacaaggaatagatccatttggcaagcgttttgaacgtacggctacttctggtcaattaaaagaaaaatatgctgacaaaacaaaagaagaattacatgacatcaatgaaacggctaccattgctggacgtctgatgaccaaacgaggtaaaggtaaggttggctttgcccaccttcaagaccgtgaaggtcaaattcaaatttatgtccgtaaagatactgttggcgatgataattatcaaatttttaaaaaggcggatattggagactttttaggtgtagaaggtgaaattatgcgtacagatatgggagagctttctatcaaagctacgcatataacgcatctttccaaggcactgcgtccactgcctgaaaaattccatggtttaactgatgttgaaaccatctaccgcaagcgttacctcgatttgatttctaaccgcgagagtctggaacgctttatcactcgttcaaaaatcatctcagaaatccgtcgctatctggatggccttggtttcttagaagtagaaacgcctgtccttcataatgaagctggtggtgctgctgctaaacccttcacaacccatcataacgctcaagatatggatatggttcttcgtatcgcaacagaactgcatttaaaacgactgattgttggtggtatggaaagagtttatgaaatgggacgtattttccgtaatgaaggaatggatgccactcataatcctgaattcacttcaattgaagtttaccaagcctatgctgactttgaagatatcatggatttaacagaaggtattgtgcaacatgctgctacagccgttaagggtgatggtcctattacttatcaaggtaccgaaattaagattaatgaacccttcaaacgtgctcacattgttgatttaatcaaggaagtgactggtgttgatttttggaaagaaatgaccttggcggaagcacaggctcttgctcaagaaaaaaatgttccacttgaaaaacactacacttctgttggacacattatcaatgccttctttgaagaattcgtcgaagaaacactcattcaaccaatctttgtttatggccatcctgttgaagtttcaccactagctaagaaaaatgcagatgaccctcgtttcacagaccgttttgaacttttcattatgactaaggaatacggaaatgccttcactgaattaaatgacccaattgatcaattggagcgctttaaagctcaagccgctgccaaagaattgggagacgacgaagccacaggcattgactatgactatgttgaagcccttgaatacggcatgccaccaacaggcggactcggtattggtattgaccgcttagtcatgctcttaacagacacaacaaccattcgcgatgtattgttattcccaacgatgaagtaatcaagtattaaaaccttaatatttgatttgataaggtttataatttcaacattgtaaatcataccaaaggtttttataagttgataaaaagattaattctactagattttttctagtaggacttttttatctataatgtaataaagtattcaaagaaatcaacagaaaatttaaaaatcccttattatcatttttgatttaatttttagatttagagaaaataggcaaaaaatgaagagacttttattcttaattctatttgtattttcagcattattagtatcatgttcatccaaacaatctttagatgacaagtactattggaacaacagtgagcaaaatgaactagcttttaccatatatagataattagagaaaagtcaagtacggggaaagctgataaattttatagtttacaaagataataaaacacttgaacttagtagttcagacatccccaatactacttgcttcatttactggaaaagatggtgtaattacagttaatatttcaggtattgaacataactattgtaaaaagatactaaagctcttaaaaatacgaatataataattgataatggaaatgttattaaagttaattagtagcattttttattttctatctttgtgcttagtttaaaaacgatgcgacgattatattcatttttttctatttgtaattgttaataagcgtcagaaatgttaaaatattaaaatgaggagagcatatgtctacaccaactatacttaactatcaaggaaataagtcttctttaattaattttttaaagaataatttacaaaagtatttacttcctggagatatatttttcgatattttctctggtgccggaagcgtcgcttcagcattcaaaagcgataatattattatcgctaatgatgctgagttgtacgcaacgattatatcgtctgcacttctaaatacccctaacacagcaattctaaaaaatactgttattgaatttcaagataagcttaaaaaaaatatccaaaaaaaccaaaaaaaattcgagactctcatttcagaagagaaagaatttctcaattcgaatgataataataaacttgtaaatctatataagaattttccaacaatatggaataaccttgacaaaaaaatcaatgcagaaaatttaaagttactaggtcagtataatctttttacttattattattctggaacatactttggaattgaacaatcaatagccatcgattctattgttgaaacgattaattctatcagcgaaaagagtgctacagatacactatacagttgtcttttctttgcaatgaaagaagccgtatttgcaaaggatggtcatatggcacaaccattaaacccaattaaaaacgaaaaaagacatctcaaacaaagaaaaaaaaatatcgctcaacttttaaaacagaaacttgaagaatttattatttatagctctacgggaaaaaataaatacaatcaaattcataggtcttataacctagatataacagatatcactaagcaacatctcctatctgatttaaatatcaagatgatttatgcagatccaccatatactgatatgcaatattctcgatattatcatttactgaatgttgcagctagatatgattttccaaaaccgacaatattaagaggaaaattcaccacaggtttgtatactgaaggacgaaatcaatctgacctcagtaaaaagagtactgcaaagaaaagaattgaagaactttgtgaatattgtaaacaaaataatattattctagctttaagttatgcttatcctgaagatataatcaatcaaaaaactgatagatatactatttcaattgaagagcttattactttagcaaaaaaaatttttggtagtaataatgtatctatcgccgaagagaattataaacatgctaatcatagaaatagctcaaccaagaaagtttttgaatatctaattatttgtggtccaaatacatcagaaaatgaatcaccaaattcactgttaaacctaaaatatgaattaaaaaatacaatacctacatcaaaaaatccaatttacaatactcacttgtattggtctcaaaaatcatttaatgtcattgaaaaaataatcaaatatttatcaaacgaaggtgataccatcttcgatccttttatggggtctggtgtaactattctagaaacaattaaaaattctatgaatcgtaatgctattggttgtgacattaatgatatgccaaattttatcgtaaatagtattgtcaatgaatttcaaaaagataatattaaggatatttttaataatttggataaaaaacttaacgaccttgtttcgtattatcaaaccacttgtgaacaatgcggttctaaggaagccgttatcacaaaagtcgtttttgacaagccgattcgtactatcaataaatataatatcaaagctgttaactacacttgtccaaattgtggtaaaaatactaaacaagctgataaacatgatgaagttaaaatgttagagttacgctgtaaagaatatatcactgatgaaagactactccaaaatagtaaaattgctgtaggagaaaacgattatttatcggatctatttactcctagaaatttttctgtccttaatgaattggttggctacattaaagagtcggaaaatccaaatttattaaattacttactgatgtcaattattcatctttcaaagattacagatcttcattccaattctcaatggccattatggatacccaagaaaaactgtgttgaaaaaaatatcatagatttgcttaaaaaaagaatcagcaatttcaataaagcttctatctacagtaaacaaaactattcaggtagtcatattgtcacatcaaatactgaattaatccttaattctgcattactactaacgaaaggaagtcaacatatttccgaaaatgatatcccaaatgattcagtcgacttgattgttactgacccaccttataaagatcaagtattgtattctgagtacatgcaattatataagcctattattaatctcaattataatttaaatgatgaaattgttgtttctccttcaccacttcgtaggcgtggtgaaatagaatattttgaacttttaaatcaggtatttaatttgtgcagtcaaaagttaaaacaaggttctatcatgtgcctatttttccatgatagcaatttgccagtctgggtggggttaataaacattcttgaacaaaatggttttaaatatatcacacaagaacatattaagaaatcaaagactgttaagaatattatcagtcctaaaaaatcattatccggtgatgctgtgctcttctttgaaaatacaagaagtgtgattgagacttataattcaaaaattactccagaagaaattgcttataccatctatttagaggcaaaaaaattgttagaaacaagcggagacctatccacacccgaattatatgattttggtttgatggaaatacttataagtaatggttggttagaaatactttcaagaaaatataaatcattagttgaaatttttgaggaatatttcatttggaacaaaacaacagcaaaatggcatcttcaataaatgaagatgtctattcatagatttgagttataatacttccctttaaagtatttatctaatttttgtaccaattcatttccattgattatcattaccccctgcgctttggccactttctttgcatccttagtataatcagaagtcgtatagcaagcaatttgttgtgcgcctagacgttctcgttctgaaactaaacgctgtagaggagttgcatcaacatttccaacccatcgtttacattgaatcaaccaaaaatcttttgtgttaccgttaaactgttgagcaactacatcaacccccatgtcgccgcttccaccttttctatggacatttacaaagccttccttttcaaacaattgtttacagagatcttcaaaatcatatggatccatcgttgctacatcaatagcattataatttatattatgtggcaaggactttttaacataaaaatcaccatcaatatcagtcttatctgctactaacgaactaatttccttaatatttttatcatcattaatgatatcaagaaatgtttggttattgccatcagataattcatctattaattcaagatataaatcttctaatacgaatttctctttgctctttaggagtttttccacataagttggtactaattcataaagtttcttaaataaggtcgaattgtcttcttgatctaaatacagaatctttttggatagttgtacttcttgattatcagaaatatagaagttttgttcaatgacttgttttatacgatttacaatctgcgaagtaatatgttctcctgagcgccttacatcctcagaaataatataaattaattcagtgaaagtaatagagttatctttcagattttttacagtattatacaccatatcaatgattttattttcataattttcatcatttacataaagatattgcttttcttttttcaatttttggaatacaataattacttcgttaatcaatgtgttacgaaatgctgactgtttacgaagtgtcggatcttttttttcgacactagttctagaaacatactcaaacccattttttcttgctagatcgacaatcttagtaaagacattaaagtatttctttttacctaattttgtaaacaatattacaggagctccctcgtatagaacatctgaaaactgcttaaacataacatctaaatcaaatacatagcgctcccaattttttgtctttcgtttgggggcattcgtcactactatttcttgttctaacatttcttctgttaattgaaatagatctcctctatcagagaaatgttctagccaaaccctaaagagttgatttcgttcaaaatatggcacttgatcagtataaggaaaatctgtaaagattgcaccgacctttaatcccatattttccttaagataagatgcataatcagaatgaataattgaatagttttctgactcactaaagtctgtgacaagtatatctttatattctttttgaaactttagaaaacttttaactttttgctcaaataaataccacacattcatatcttgagctttttctaatacaacatgatataaaatatctgttgagcttccatacattgctattttagctaaactcaacgaagagactaaacaaaattgtaaaaagtcctttgattttgaaggagccaatgcagaaattgctttttgcaaagctagcaatgctagtttatttctgtgagtgaaaaaagtatcatatctatctgcacctgtagaacgagtaatattaatcctactgttctctagtaatctatcttttggaaaatcttctactgataaatcttcttgttcttgaattctctgccaatcgtcttctgtaaattgtttatcaaaattaccacatattggacacttaaacaataattttatattcttcccgtttttgatttctcgatttgcttctgggtataaataaccatctttgccattttgaggatcaaagagcacctttttgatatagtttttttgcccacaacattcggtttcgtacaaatcaagtatataatcttttgaatcatcttccacttttttcagaacattctttaattcttgataatcaactttttcaaagagtaccttatcaatagaatatgtaaattgatctaattccgtaccaatcaattttcgctttgccaactgacttccaataatagtagtaccactaccaataaaaggatctaaaattgtatcatctggatttgtaagaacatttaataccttagcaataacttctggagatttacgacctttaaatgagtaagtttttctcattacactaggaataatattctctgtgtcctgtagtacgttagaaattatatcagtgatttgttgtgaattaatcttttttctcatcgttttcctctagtaatttaatagtttcaatatctaaaattgacgcaatagtatcgatctttttcaaactaacagtactacttcttgtaagcaacgtttctcgataggaacgataggatattttatcttcatcaaagttttttggggaaatttgttttcttcgattatacttttcgaagttagaataaaatatatcaacaatattatctttccatataggagtacctattgaaaattgtatatcttcaattagtaattgagatggatgaattgacatatgataagctaatatatttaactgatttagacttggtgttgttctgccacttgaccaattttttaatatactaaccgataactgtttatcattaatccgttttgcaattagatttagtgatattaattttttatctttctgtctataataatttaagatattgttaacaactgtaatagtggaatttcttttattcatgtttatattttacatcgagcttattattttataataacgtttttatacactgttgttttttgtttgtgaatacgaggtatttagaataaaataatagacagcagataaaaaggagattttcttcttttagttcttcttatatctttgatattccaaccattcaactgaaatgaatgatttttataacagagctttcttgtccatttctgagatttattaaattcaatcacagagtaaaaataatgaccccttctttcgtccttatttattcccttgctcaacttaagatattttttctgactcattgctatttctctatagtcaaattgtagtttatccatctagatttttttattcatccttcatttcttctaccatacttactgtaacaactaatatttaccagttgtttttattataattgctttttgagtgaggtgagttcagttacttactctaaataaaaagttttttcttattgtctcttacaataaatatacctaataactttcttatatacaattgacttatcaagattaatatttataattttgattttatgtcaaacttggtattatccctcaataatgaaatagtgtgttcgaataagaagaatcccagtcatttcattattccctgtcttggtgattgacacgaaagataacttctatcaagcattttaatccatctaacctataaaatcaaaagctgttactaatttgattatataataatttaactgttaattatctccatttagctagtttcctcgaaggtatcaaggtaatattttataactttacttgcaacttcatcaataatcgcatgattacccactgacacttctttattatcttttaccagacttttgtaatctactaagacatacttaggtttattacttttttaaataactactttattattattgtcaaccattcgcgatgtcttactcttcccaacgatgaaataagagatagcatagagaaaatagcaaatttatagatcgttatcaactcctattggataattccagtaggagctttttgatatttataattaagtttaaattcctctggaaattttctacttattgtttcaatcacaatttgaaaaatatctcgttttaactccataaaaaagcactagatttacttcttctagtactttttcgtttattattaccttcttcgctgaccatttagccaatcaaagacattactataagttctgccattgacagtagccctggcatcaccaccataggttggattggtcgcaaccatgccagaaagtccagaccaatttttagcattgtcagtattttgagtgccagttacttgatcattcaagaaataaatccaagaccagtgaccgttataagtgactccagagtgatgtttaccaacattggtttcataataggaaagccatttattttgtgcaccagcttgaagtaattctttatagaatggcagaacactactatctgcagatattgttttatcagcccgtgtatgaatcaaccacattggttgaccttttagagctttcaaagcagcagcggtaatctgattatctgttaattgattactataggaagcagcaataggaactaaggctgcaaaatagttaggataagcgactcccatatccagagtcataccgccaccattagaaacacctgccaaataaatgcgtcggctatcgatgtctggatggcttgctacataggctttaatgagcgccattaagctagctgtttgattttgagaccaaggagttgaactttgaggaactagcacataggctcccttttgactaccactacctgtagaagtgaaatggctttgaataggatcttccgttaaacgagccacattgctggctagaagcggaatattaatatcagtgcctacttctcctataccatgcaaccagacaatcaatggattcttctcaccgccaatagctgcttctggttgataagcggcataattaaaattaccataactaccacgttctgagaaacgatccgttgtaggcaagaaacgattattgatagcatcttgctctgaactgataatttgactgctattagaaccatctgcttgcacctgcaaattatctactttgacagtataactgttgacccagttattacgaaaggctgctgagtcaaaaataaaaggtgatgcatttcggctgctatcatttggatcataaggaatatctaattcaagtgtcacataatggctactatcaaagtaaaccacatgtcctgaagcattagagacataagaattaagaatttttctttgaactccagcagttgttaccattgcaccagcatgaacaacagcaggagttaccttataattgaactcaagaataatctttgaaacagaaggaccaaattcataactatcaactacaagactggtcttaacaacctcaattttgtcaatcgcccttgcatttccatcattatcaaattggtagttaacaccattaatggttcggcttgtctttctcagtaaatctccagaatttttatcataataacgcaaagatccatcttcttcaacaaaattccctttaacctgactaccatccgaattaaaatacagagactgaccattgacagtaatactaccggtgacagggacaccatcattattaagataataccaattgccttgatcattgacaaagcgattggtccacatctcaccactatctctatcataataatgtttatttccatccgaatcttgagcaaaagcacctttaacttgcttaccatcttgagcaaaatacatagtcttgccaccaatcgtatgactgcctgtaacatttctaccatcagcaccaaggtaataccaattaccattaccatcattaacaaaggtattaatcgaatgtgatggggtcttctctgcttcagtagtcattttaacatgagcagattgttgtttaaagctgttttgcggtaaattagtttgttcatctgtttttgtttgctgactatctgaagatatttcattaacagtattttgtttgtcagactgactcatattattagctgaattcattgaaggggcatcagttgcaacacttcctgttttttcttgaggatccttgtttgcactatccgtttttgcttccacctgatttgaagtctgattctccactttttgggaactagcgttaatcttacttgtttgcctttgttcagttatcactgtctcgtcagcttatgcagtctttgttacagcaaataagaaagctatgatcgcaactgaaactaaaccaaattttagtttacgtaaactaaagtgtttttgcttttcaaatatcataaggagctctttctatattatcattattttaatcaagtttaacactttataaaatgaaatactatggaagttccagcattgtaatctaaaaacaatagcaatgttagaattgttaaaaattaagttaacaaaaattaacgtatttatggataagataacttattaatttattaaaaattcaatattagaatatagataaatctcttttttcaataaagttttttaagttctgcaaattttaaaactaactcttttattggcaaacgaagagcaagatccaaacgagtctttccgtcatgataaaaaagaggactttgtcttcaatctgaatctatttttttgaatacagtaatcttgataatatatttttcagtccattatgctataataacaataattacagttcagaaaaatcaactgctaatgaaagcataatcaacatgaaacgatactatatttcttacctatcagctgctatttttattgtctatggtctcttttcttcaaaattaattttcgcagcactgggacttgtttttctacttatcggtctcagggacagtcgttccaaatgatttaaaggatacctaactaatatcattactgataaagtaaggttaaatcaaaaagaggatgaagagctttaatccaacagctttactttcttcttacttatttttgatggagcacttcatcatcttgacaaaaataggttcaagcattattatcaataattcataatctttacttgctttgattttttcacgtacttctaacagtcatttcatcattttaaaattttcatttgattcaatgagatgataaccgttttctgctaatatacatgctccttttagcatacaaactcaaatcaagaacttgaggaattaattgtaaattcaagtatttttcttttcgcaatctgattgtttagacatctctgattaattttccataatctctattgtgttttatactgtcagtaattcttacaaactctttatattcagcaataataggtacaccttttttaatttttaagcatacttaacatatgctgttttttatgctataatgcaattaacccaattatattagaaaagagattttcaaaatgaaaactcatccaaaaaagcaatcactcagcgaggtcaatcagagcgttcgtgttcctaaaaatgcctcttttttaacaactttaagagcttttttaggacccggagcactagttgccgttggttatatggatccgggaaattggattaccagcgttgttggcggagcaagttataaatacttgctgttatcagttgttttgctgtcttcacttattgccatgcagctacagcaaatggctggtaaactgggcattgtctcgcgacaagatttagcgcaggcaaccgcctcccatcttcctaagagattgcgttatcttttgtttattgttattgaattggctcttatggcaacagatttagccgaagttattggctcagggattgccttacacctcctgtttggttggcctttgcttttttcgatctttattaccattttagatgttttcttacttctatctattatgaaacttggatttagaaaaattgaggccatcgtttcaacccttattttaaccattctagttatttttgtttacttagttgttatttctcacccgagtttttcaggtattattaagggttatattcctcagtttgctatttttgattcagcacaagcagctactaacagtaggttgaccttagcacttggtatcattggcgcaactgtaatgcctcacaatttatacctgcactcatctatctctcagacacgtcaagttgattataagcaaaaatcttctattgctcaggccgttaaattcatgacttgggattccaatcttcaattaagtctcgcctttattgttaattctctgcttttaattcttggagcctcgcttttttatggacatgccagtgaaatcagtgccttttcacaaatgtataatgctttagccaataatcacattgctggagcagttgccagttcttttctttcaactctttttgccatcgctcttttagctagtggacaaaattcaaccattactggtacattaactggacaaattgttatggaagggttcttacatctcaaaatgcctcaatggctcattcgcttagtaacacgtctcttggccttattacctgttttgatagcagctattctttatggcagtcaggaaaagattttggatcagctgatcgtctattcacaggttttcctgtcagttgctttgccattttctatctttccactggtttattttacatcacaaaagaaaatcatgggagaatttgttaatgctaagtggaatacttatctagcttatggagttgccactgtattaacaatcctcaacttgcaattaatcatcaataccattttttaatagtatgctttgatgaatcaatgtcaattgcagtaagttcatctatgaaggatatattatagttttaattgaatggatgaaaaaagccctatcaaccttacagtgaacttactttcccactacagatatttagagcctgtttttgtatgcttacgattgtataacaatagcaatcatggatgtttgcaactattttttaaattcattgactaagacatcaaattcttcattcgtcagtgtaatacccttacccattttggtatggtcggggctccaagagcgaatatcatattttgctggagcgccattaaaactaacgcgattaagttctttagtccaacccttatcgttttcggataagaccaaaagtttttcttcaatttcaaatgtaaattctgccatataaatccctcctatttatctattcgtaaaaaaattttagaatttatcgttttgcttacaatttttaattagctatttcaatttaatctaaaataaggtataatcattctaacaattttttagagaaaatgccatgaaaaaatttctacgaactatttttgagcatattagggaatttgtcgaaccaagtaaaaaatctcctgatattgttttaaaaacgaatcaattattacacactattttacaagcacagaaagagcacgaagctgtccatgttatctatttagacaaaagttttacaggtgatattgtcaaatatgataaagaggctaataaactcattttaaagaactttcaaaagaatatgtcagctattattagtatctcagatattaagcgtttaactcttgtccctaagaccgttcgtgattcacaaagattagaaaagtaaaaacaaaggataataagtcctttgttttaatttctaatcaaataatcaaaggcacctaaagccgcagtagctccagaacccatggaaatgataatttgtttgtaggcactatctgtgcaatcaccagctgcaaaaatagcaggaatattagttgcgccatctttagcaacaatgatttcacctttttcattgagtgctagtccactatcctttaaccagtcagtactaggtaccaatccaatttgaacaaaaacaccttctaaatcaagcaagtactcttcattggtcgtacgatcactgtaacgaagaccttctacgtggtcattgccaataatttctttagtcgcaacattagttagaatggtaatattatcaagagcttccgcacgatcttgtaagatcttatcagcttttaactcaggtaaaaattctaaaatatagacatggctagctaacccagccaaatcaatagctgcttctaaacctgagtttccaccgccaatgacagcgacttttttgtctgtgaaaagaggaccatcacagtgcggacagtaagtaacacctttattaaagaattctttttctcctggtacattgattttacgccacttggcacccaaggccaaaacagctgtctttgctttcaaatgagctccattatcaagtttaacttcaaccaagtctgtcttttgaatagacttagcacgctgtgccttcatgatgtcaacagaataagacttggtatgctcttccacctgagccattaattggggtccttcaacatatggggtaccgatcatattttcaatacccacggtttccataacttgaccacccatggtttcagctaaaagtcctgttttaactccttttcttgcagcatagatagccgcgctattaccagcaggacccccaccaataacaaggacatcaaaaacacctttatcatcaaaagcatcttctttaagaggacctgctatcaagtctagtaattgctctatgctagcacgccctgaggtaaattctgttccatctttatagacagttggcacagacataattcccttagcttcaatttcatctttaaacatgccaccttccaccattgtatgtgaaatgttgggattaacaactgacatgatattgaaagcctgaacaacatctggacaattatgacaagtcaaactaacataggtttcaaaatgcataggttcatcaacagcttgaatgcgtttgacaatatcagtctctaccttaggcggacgccctgaaacctgtaacagagccaagataaacgaagtaaattcgtgaccaaggggtaagccagcaaattcaacaccagattcttgcccctttttagctatgcgaaaactaggtgttcgcggaagttccttttcttctaaagaaatcataggagacattgcaacgatttcttggagaaattccttaactttttgagaattagcatcatcttttaattgagcttgtaaaacaatctcagactcaagtaattgaagatactgtcctaactgctctttgatttctgcgtctaatgccatagtttctccttaaattttaccgacaagatccaaacttggttttaaagtttcagctccctctttccatttggcagggcaaacttctcctggatgttggcgaatatattgagctgcacgaactttatcaatcaaggtactagcatcacgaccaataccatctgcattgacttccatcatttgaatgataccatccggatctacaataaaggttccacgttgtgctaaaccatcttcacctaaaatctcaaatccttgtgagagaacatgagaaggatccccaatcatagtataagtaattgttccaacaacatctgaatcatcatgccaagccttgtgaacaaaatgagtatctgttgaaacagagtaaacttccacacctaaagattgcaaagttgcatattgttcttgaagatcacctaactcagtaggacacacgaaagaaaaatccgctggatagaaacaaaaaactgcccacttccctttaacatcctcattgttaaccgtaacaaattctccttgatgataagcttgggctgaaaattcaaccatttcctttccgactaaagacatacacttgtcctccttctaaattgttttcattatcattttcattatatgaaaagtctctcaaaaaatccaataattaaactaaaaataaaatttgaagcataaaacaaaagagcatggtttcccatactcttaagttctaacagtaaggctgctgccatcttctttgtaaagattgaccaagccttccttgcaggcacgaatcatatcacctgctttgacttcctgtggtaccgtaattgtcaataactccatcggttttggcgcacgttcaattttttgaccatccgcatcatgtaaatctgtaataaaggtttcaaaatgacggaaaccaggtccgtagaattcaacccgatctccctcattaatgacattacgctgacgaatagttgctgtcatacttggctcatcaaaatcaaccacttcaccgacaaatttatattggggaattttacgacgagctccaaaaagctgttcattttcagtaggtgtttggtaatagaaacctgtagccaattcacgctgagcgactttccacaattcgtcaatcaaatcttgtttgatagcttcaaatgcttgagggctttccagataggcattgacagccgccttgtaacaatttgtgaccgtcgaaacatagtgaatagacttcatacgtccttcaattttaaggctatcaacaccattttcaatcatgtctggaatattttcaatcatgcacatatcaacagctgacattgaaaattcctctggtacttcacctttcaatgaccgtctttcttgaccgaaaggcatatcataaagattgtatttccaacgacaagattgtgaacaaccaccacgattagcatcgcgatgactcatatgattggaaagcacacagcgtcctgaataagaaatacacattgccccatgaacaaaggcttcaatttcaacactcgtacgcttacgaatctcagctagttctgccattgtgacttcacgcgctaaaacaacacgtgtcaagcccagttctttccaaaattcaaaggtttcatagttagtggatgaagcttgtgttgacaaatgaatttccaaaccaggtgcatctgtcgcacaaatcgcaataagggctggatccgatacaataactgcatctagacctaagtcgcgtaattcacgaaaccatgcaccggctcctatttcattgccctcatgagttaccatgttagcagccacataaaccttgaccccatgatcatgagcataattaattccttcagccatttcttccatcgaaaagttacctgcacgactgcgcaaaccataagcttgtccaccaacaaaaacagcatctgctccatagttaacagcaacttttaatttttctaaagtcccagcaggcgatagcacttctgggcgttttaattgttttgtcattatgttattctccaattttcaagattgtaagaagatttccaaagtcagactcatcaaaacaatattgttgatggggctgacaagtgcaatccctagaaaaaccttatgagagtgggacaaaagttctgcctttttgattttgtcccactctcataaacgcaggtaattaccgttgggattgacaatttaagattataaaacttataataaattgctgtgccctgaaaaaggaaaactctatcacagcaatcaaaagctaaacagtgaaaaattacttaactgtttgcggatcaagctcataaaatcctgtatctaaaccacgaccagctggatgaagctttctaatttgttcatcgaaaagaaaagcctgatcttgcgtaaaagtcccagcttcgatcatatctcttgctttaacaaaaagttgaacaatctcaacaaaattatgtcctggacaatagataccatctaatttccaatgattgtaacgatgattaatcaattcaggcaatttggtcatcaaatcaatatcattattgataaaaatatgagtgccgtgtttatcttcatatatagaatagtgcgattcaggatcatttggttctgataagaacagaccgcgttctcttgtcttctcatcatcaatgtgagtaaaattataataattctgtattaaaggtcgcttggaatgatgaatgacagaagcaccgtaaactaagacttctgcaggaatttccagatttttagacatttcaaacagttcttccgaaggaatttcacgtgccaaaacagcttctaccgcaccgtgttggccccaaaaattaacttgacgactagaagtgacaaaaacagaggtatcataaatgagtttaaaatgataaccatcacgcttattgacataaaaaacacctgcatcaccaaccactaagtaatctacctgaatttccttcattaattctaaaaatggtttaatattgtccatcatttcttgatgcattagtgcattagcagcaaccgttaattctttaccagcttcatgaaccaagctagcaatttctcttaagtcatcatagctaaacgcatgcggtaaacgaagcgcataatctttctcaccaacataaatacggtcaacaccacttgccagtaattctttaacttgttcaatagattctgcagtcgcagtgataacaattttttccatacctattattgtatcaaatttaagataaaaagctactttttttaaaaaatcatatctatttcaatgaactgagtgaaattcgtttaataaaacaattttctaagaatattttgctgcataataatatttttaactagaatatattacaaaattagaatatcaaagaaaaagtttcaaaaactaatgacaaacttttcaatttgtgataagatattaaggaatatttagaggaggaacttatgtcagcaaatctgaataggcagacagaagattttgaagatcttaattttcaagaagaatcaatgcctaagtatcaagaatttcaagattttgatgataatagaacaaagctagatgaactcatcttttttgctaaattagcttttttctgcgtaacgactattctagtgtgtttcattctattagtcgctaagttttctccaatttttgctttcccactagctatgctgattagctggggaatcacagctttagctcaaaaaggattaaaacggcttaaacattaactattaactcctaagggagtttttttcttgccaaaaaaacaagataactgcaattattagtctcctaacttctatgcagcagtcttgtttttaattattaatcttttttagttttttcttctgcttgataatcaataacgatatcatctacttgagccttcatttctccaagaggaataacagcatcattagtacttgcctctgctttttcgactgtttgtgctaaatgatctttcacttgagacaatttgctattagcaaactctcctgcttgagaagccttttctttaacactagaaataatattgtcttttgttagctcacctgtttcaaatttgtccttataatctttaaaggaatgaacggctacatctttgtattcattcaccttatcggcagcgtattgatgatattctttagggttctctttgtaatccgtaaaagtttgatggatcttcttcttaaactgttttcccttatctgttgagagaaaataagctgcagcagctcctgataccgctccgataatagctgttttcaaaaatttactcattattgttttcctttcttacgaaataatttagacgctacttttccaaaagtataagcagctcctgcctttcctacattagcagtagatttacgagttttctttccaaaataacgagcctgccgattgagatcagacacacttactgataaatcagcgatagctgtaaaaagaggatcaatagtttctaccttgccgttaacatcttcaaccaagacattagccttagccaagagttcattcgtttggtaaagcgttacattaacatcactggttaaaattttaagagtctgacgcgattcatcaacagtatctgaaattttccttaataaaagaatcaaataaataaccagaacagcaaaggcaatagcaacaattaataaagcaatttcccacatatttttctcctaactcaaacattcttacctagcattttggtaataagggatagcatgattacgacgtcttataacaattaaaataactccaacaaccactagtaaaacggaaagccactgagatacccgcaagcttgcaaacatgagactgtctgtccgcatgtcttcaataacaaagcgaccactaccgtaccagataagataaaagaaagccacctctccttcttttaaaagatttggtctacgacgtaaaatcataatgatgataaaacccagtaaattccaaagagactcataaagaaaggttggtgtacggtagtgaccatcaatatacatctgttttctgataaaatcaggcagataatttaactgagtaacggctttaccataagcttcttgattgacaaaatttccccatcgaccgatagattgagctaacatcacacctggagtagcaacatctaaaaagtcaataggcttaatcatcctataataggaaaagatgaataaaacgagtgctcctgtgagcaatcctccatagatagcgatccccccatgccaaatgacaggtatttcactaggatttttaagataataatcccagtcaaaaataacataataaagtcgtgcaccgacaatggctaaaggaaaagcaattaaaatgaaatctaaaacatcatctgacttaatgttctttttcggtgcctcacgtatagttaggtaaacagcaagaattaagccagttacaatacagatggaataccagcgtatggccagaggacctaactttatcgcaatcggattaatcatggctcgcctcattttgatcaattaaattagtcaaacgtttctcaaaggtttcagttgcatcatatcccatttgcttagcacggtaattcatagccgctgcttcaatcacaacagaaacatttcgtccagttttaaccggaatgcgaatacgtggaattttaacgccagataattcaatatcttcattgccattacccaagcgatcaaacatcttatccttctcaaaattttcaaggaaaatagataattgaacctgtgaagaatccttaacagcactggctccatacaagctcataacattaataatgccaacaccacgaatttccaacagatgccgtaaaatttcagctggctcaccccatagggtctcttcatccttagcaaaaacatctacacgatcatctgcaactagtcgatgtccacgtttaaccaactcgagtcccgtctcgcttttaccaataccagaatctccttggattagaacacccatgccatagatatccattaaaacaccgtgaacacttgtcctttcagccaaacaagaatctagataccaagacatttctcctgaaagtctactagttggcacatgactttgcaaaaccgcaataccttcttctttagccgccagcagcatttcttcgggaatagtaagatctctagcaacgataatggctggtgtttcagtttgaaacatttcttttaaaacagaataacggttatgagaagtcatttgtgttaaataagaccattctttcattcccaacaattgtatacgttcaggggcataataatcaaaatagcctgtcatctcaagccctgggcgcgagatatctgctgttgcaatttctttttgtaagagttcttgcgtcccataaatcacatccaattttaccttgtcaaccaacatctgtactgtaactgacatactacctccttagcaccatattataacataaatccttataaaaaggggttctccgctttaaaagaaaaagacaagatttactaacttgtctttcaaactattaggcaaaggttgtagggggcttctttcctgtttctaagaagtcctattctaaaataattgattatctttaagttcacacttaagacagttttcaattaccaaaaccatttgttatcatcttcttcatcaatgacttcagcatcttttcgtttacgcggcccttgagcatgacgataataagtcctttgctgattatctttttcgagatcctctttgtaaggtaaacagactgctaagatgatatagagaataatagctcccggaaaaatatacataaaaagagctgctaaaattctagctaaaggcaattcccaaccatacttatccgacagtcctgccacaactccgcagatcatactaccttttcttttcttataaaaagtggctttagacatacaaacaactctcccttttttaaaaaatgaatcacaaatctcatgatgctattagtataaactatttagagaagaataaaatcagccttacgactgattttgatgtcttaattttccatggcagttgccacaagcgtattttttcgtattcattcgtctttttctttgataaacttgaccacacgattcacattggtaatagtggtaaaaagtattgctttgtatacttggcgcataacgcactccattgacttgcagcaacaaatctttaaaatccttatcgccatgtcgataacctttacctgcataatagagatggtaatgacaaagttcatgacgaacaatttttcgaaaagttcctgcatcaccctttttgcagaatttaggattaaaatccaaatgtccatcttcagggaaaaagcgtccgcctgttgtttgtagacgtgaattccaagaagcagtatgttggaactctataccgaaatcttgacgagaaacctcttttacataatcagttaaattcatttaaggccaccaaagaaagactaactttcccccgttctatatcaatttttgaaacccagacagtaacaacatccccaacggctacaatttggctgggatgcttgacaaaatttttgctcatttgtgagatatgtatcaaaccatcttcatgaagaccaatatccacaaaggcaccaaaatcaacaacattacgaatagttccttctaactgctgtccaattttaaggtcagacaattcaagaacatcctgacgtaattggggtgctgcaaaatcatctcgtaaatcacggcctggttttagcaaatcagcaataatatcctttagagtttcctgtccaaggttaacttcagtagctactttttcaattgctactgatcgtaattttgatcgagctgattcatccaattccgttatttccaaaagagcaaagagtttttcaacagctgtgtaagactctgggtgaacacctgtattatctaaaatattctttgcattcgggattcttaagaagccagccgcctgctcaaaagccttatcccctagacgaggtacctctttaatttcttgacgcgactgaattttgcctttttcttcacggtacttgacaatattttctgagatcgttttattcagtcctgaaacatgagaaagaagggcaggactggctgtattaacattaacaccaacctgattaacaactgtttcaacgacaaaatcaagattttcagctaactttttctgaccaacatcatgttgatactgaccgacaccaatagatttaggatcaatcttaaccaattctgccaaagggtcttgcaaacgcctagcaatggaaatagcagaacgtttttccacacttaagtcaggaaattcgtgacgagctaactccgatgcagaatagacagaggctccgctttcattgacaagcacataagaaacttgtgggaaatcctttaaaatctctgcaacaaaagcttcactctcacgactggcagtaccattgccaatagcaattatttcaatggcatatctcttaataagttctgcaagttcgcttttagcctgattaatcttggactgactagctggaggcacaggataaataacctgagtcataatcagcttacctgtctgatcaacaacagccagcttggctcctgtacgaaaagcagggtcaaagccaagtaccactttaccttttaagggcggaatcataagcagatttctgagattgtcagaaaacaacttaatagcaccatcttctgcttcctcagtgagttccgctcgaatacgtcgttccatagcgggtaaaattttcttttttaaagctgcttgaaccacctgttcaatcctgctgcttttttccttaaaacgtgcttcgaaaaagcgtgccatcttgtcaagattgtgttcaaaataaaccttcaaaacacctagtttttcaccacgattaagagctaaaacacgataatcttgaatttttgcaactttttcggaaaaatcataataaatttgaaaaacctttttttcatcaagttcctgatctttgactttcgacaaaataaaactatttgtccaaatttcattataggtccatgagcgcaactttgtgtcatctgataaggcttcaatcaaaatatctatggctccagtaagagctttttcagctgtaggaaaggtttcatttacaaaagtttctgcttgtttttccaaatccgaaacattttgtaaaatgaggcgcgccaatggaaaaagtccattttcacgagcaatggtggcttttgttcgcctcttttctttatatggaagataaagttcttcaacatcagctaactttgaagccgcttcaatcgcttcttgcaattcagctgttagtttgccttgtccttcaattttcgctaaaacagtcgccttacgttcggctaatgctgttaaatttttatccagatcaataatagacttaatttccacttcatcaagattgccagtcatttctttacggtaacgagcaataaaaggaatcgtatttccctgagcagctaaatctaaaactttttgtatttgactttcttttaagtgcaaatcttcagcaattttttcaataatttccataaaaaatattataacacaattactaaaaaattaatttacgaatcagtaaaaataattaccgaacttatgtaagcatctgattaattatactttgtaaatctttattataactcaaagtccttttaaaaaatatttacctcctaaatggtggttatttaaccgtaaatggtaaaaaatgagaagtttttaataaaaacaaagaaaaagtgagaaatttcatcaagtacattctcattctttttatcttacactattgcaaagaatgttttcattttggttttatctgtctccttaaaaactatttgataaccttagtgatcttgaacttgatataataaagtagaaacaagaaaatattataccaagaaaaacatgctttctaatgttctttcaagatctgttgtttcaccaaatgttgacattcctaattcaatggtcattctttctcctcttctaatctctatctccaattatcactaattagtaataattacaacatatacggttaaagtttctgtgctctatactaattaaagactgctgttgtaaaagcttactaatcgcaattttactatataactattaccttggctgttttaaactttttactgctaaagactgcaaacaaagtgagttcaaacgataggcaccgccgtgatagtattttcacgttttaggagtcttaagattctagcataagaagattaataagtattaaattaactctggtttttcttagttatcctatagataacaaaaggagaaacttacaagtaaccgtaaccaagtttcaacggcgataccagctaaggtaattatcgaaaaaagaaaagatgtggattgattctttgtgtttaaaactgtcatattttcttatttggtagtataatgatattgttgagaatgtagacaactctattactctattttcaacataaaattttagcttgcaaatttcaaggttatttcctttatttgcgagctaagcgagctctaaacaaggtttccaccatgataaaagtgagaatgagagtaaatcgggatttcgtagaaattgatttctctcgctctcttgttttaagatcgggtaaaaatcatccactgataatttcacctatcggtgactcaaacagtctgaggattgtttaaggttaaaaagtctcaaaaaagactttttttcaatctgattttatctattatttagaaatgaggtattcttatggcgattacattcaagaaaaatgatgaattagaaaaaatgatggaaaattttgctaaactccctgaaggcttagaaaaagttgaattcccagatgataaagaaaagaaagctgacaagaaagtcaagaaatagattttatggcgatttttaatcatttaccaagcagtgttctgcaatgcttggcaatcttcctttctattatcatcgaagctctgccatttattctgctaggtgctattttgtcgggttttattgaagtttatctgacacctgatattgttcaaaaatatcttcctaaaaataaaataggccgtattctttttggaacttttgttggtttcatctttccttcttgtgaatgtgggattgtccctattgtcaatcgttttttggaaaaaaaggtgcctagctacactgccattccttttttagcaacagctcctattatcaatcctatcgttctttttgcgacgttttcagccttcggtaattcttggcgttttgtttttttgaggctgtttggagctgttattgtagctatttctctaggaattttacttggctttatagtggatgaacatatcatcaaggaaagcgccaaaccttgtcatttccacgattattctcataacaaaacgtatcaaaagattttttatgcattagctcatgcagtagacgaactttttgacacaggacgttaccttatctttggaagttttgtggctgctagcatgcaaatttatgtaccaacgcgtattttgacttctattggtcacaatccactgacggctatcttaatcatgatgctcctagcctttatcctttcgctgtgcagtgaagccgatgctttcattggaacttctttgttggcgacctttggtgtggctcccgttgttgcatttcttcttattggacccatggttgatatcaaaaatctaatgatgatgaaaaatgcttttaaaacgaagtttattctgcaatttgttggcacatcaagtcttatcattatcatttattgcttgattgtgggggtgatgcaatgattcgttttctcattttagcgggttactttgagttgggcatgtacttacaattatctgggaaattagatcgctatattaacagtcactattcttacttagcttatatttccatggctttatcctttattctggcccttgtgcagttaaccatttggatgaaaaggttaaaaatgcactctcacttatctggaaaagctgctaaattttttagtcctattattctagctatccccgtttttattggacttttagtcccaacagtgccacttgattcaacaaccgtctctgccaaaggctatcatttcccattggctgcaggatcaactacttcaggaactagctcagatggaactcgcgttcaatacttaaaacctgatactagtctttatttcacaaaatcagcttatcaaaaagaaatgcgagcaactttaaaaaaatataaaggatctggaaaactgcaaattacaacgcaaaattacatggaagtgatggagattatctacctctttcctgatgaattcaaaaaccgtcaaattgaatatgtcggctttatttacaatgatcccaaagataagaacagtcaatttctctttcgctttggcatcattcactgtattgctgattcgggtgtctatggtttgttaacgacaggtggacaaacgcattatcaaaacaacacttgggttacggttagtggaaaacttgctattgaatacaatcaaaacctgaaacaaactctgcctgttcttcatatttctcagagttcacagacaatgcaacccaaaaatccatatgtttatcgtgtgttttaagaataatatctcaattaaaagaagtctaacaaggttcatttctaaaaaatcagctttgttgtacttcttttttgtgttacaataatgagaagtaagaagaggagaaaacatgattagtacacaacagacagataaagtctctcgtaaaactcagctttctatcatagcaactgctttggttggtttttctggtattctatcagaaacaagcatgaatgtgactttcaccaaattaatgactattttccatttgcctttaagtagtctgcaatggattacaaccgtttatctcttggcagtcgccatttctatgacactgagcgccacattacaacaaaatgttaaagagcgtctacaattcacaatagcagtcttgctctttcttctaggtacagtaacatgtatcatctctgctcattttggcttgatgattattggcagagctctgcagggggctggtacgggaattgctatgcctttgatgtttaaccttattattgagcgcattcctatcaacaagattggaacatatatgggaattggcggacttatcatgagtttagctcctgcttttggacctacttatggcggtttcatgattgcccatttttcttggcaatggatttttttactaacactgccagttcctgtaattgctttaattatcagttatttttctttggaaaattcacctaaaactagtaaacgtccctttgatttcatcagttttcttttattagcgatagctttgtccttctttttaatccttatttccggacttgaatcaggttcccttaattggttggctttaatcatttttggctttgctcttattttctttgtgtttagaagtctcaaattgcagacgccttttttagatattcgaatcttaaaacaagctcctgttcttttaggcttaatcccttttttcatctatcaattttcaaatttagcttctaactttgttattcctaattttcttgttcaagcagagcacatctcaactacaatcgccggttttgtgttactgccaggaacacttttaggtgggatcttagcaccattttttggaaaactttatgacttaaagggccctaaattatctctttattggggaaatactctttttgctgttagccttggtatcttcgctttatggataaactctttaaccattatgttaatgatccttgtctacatcattttcactttcggacgtaatatggcttttaacaacactatggcagttgctatttcacaattacccaaaaataaaacagcggatgctactgctattttccaaatgatgcagcaatttgccggtgccttaggaacagctctatcatcagttgccctccaattagccccaaatatgaccagtggtgtgaaatttatcttttcaactttatttaccttggttatccttattttcttttgtttcaaaatgctctttgcttccttgaaaaagtattaaccattaaaaaaacgccttgatatatcatacttgtgacatacaagctgatatcagagcgtttttttttatattgtgatcatagcaatccttctaaaagtcctctcatgaagtcttcagaatgaaattcaccaatatcatcaattttttcaccaaaaccaataaatttaacaggaatcgcaagttcttgccgaatagcaagcaccacaccgcctttggcagttccatcaatttttgttaaaatcagaccggtcaaaggtgtgatttttgaaaattccttagcctgaacaagggcattttgtcccgttgaagcatcaagagtaagcaacgtttcatgaggagcatctggaataacacgtttcacaacacggccaatcttttccaattccgccatgagattatccttattttgcaggcgacctgctgtatcaatcataagaatatcaacatctgctgcaactgccctttcaacaccatcatagacaacactagctggatcagcattttttggaccagtaacaactggaacatcaacacggcggccccattcagctaactgagcaacggctcccgcacgaaaagtatcggctgcaaccagcataactttcttgccttgatgtttatatttataggctaatttcccaatggaagtcgttttaccaacaccattaactcctacaaagagcataacagtaagatcgttctgaaaattaattttttcattaaactgaccgtctttgtcataaatatcaactagtttttcaataatgacacggcgaagagcttcaggtttcttggccttttctaatttagcttcatagcgtaaatcttctgtcaaggttgacgcaacctgaacaccgacatcagaaagaatgagcatctcttccaagtcttcaaagaattcttcatcaacattacgaaaattagccaagaaagcattaagtctcgcaccaaagccagtgcgggtttttttcagactgcgattgtacttttcttcctcgctttcaacagattctgctatttgactggaagcttcttcttcagactgattgacagctgtttcagtctccttttggtccgagagtgtcgtttggctttcttgctcagcagtctctgctggtttttggctttccactttttgagctaattcagccttacgtgcatagtattctgccatgaaatccggcgattgatttggcttttcgtcttttttttgctgcgaaggcatagtctcagtattattttgtacagcggctacagaattttcagaatgaaacacttcttgttggtgttggacaggctgttgcttatgttcttggacggaatgcccactagctgctggttctttcgaattctgtccgtcttcaattattcgtgcatctgatacttgttcagcttgactttctgtcacatctttttcataaacagactgctgactctctgctgtttcagcagtttctgccgacagtgctggcttttcttgtgcgacttcttgttcagcggtttcttcaatagaatccgttgttgacttttcttcttgtcttttcttaccaaataagcgattaaataaacccatttcaatcctcgtttaatatatattttttaatagcttcggcaacaccagactcatcattagtcttttttgttaccgcatcagctgtttccttggcaataggtacaccatttgccattgcaacacccaaaccggcccactctaacatacttaagtcattttcttcatctcccatagccataacttcactttggtcaatagctaaatgtttgatgagaagattaagccccacagccttatgaacccctttaggcatgatttctaaaataatatcacgtgatttgaagacttcaaatttctcataaaaataagcagggattttttcaatctgctgatctaaaaaatcagcatcacaaacaataacgaccttattataaataatatccaaaggcagttgcggcaatccatcaatttcacgaaatgtcagcataggattggcaataggataaagcgaatggttattttgattactaatactatagacgataccatcactgagaacatccactggcaaggctagatgttccatttctgtctgaatcgtttcaacctgttttctgcttagagcactcttttctaaaatttcacctgtcgtcttttgaacaagtccgccattaaaagtaatcaggtaattatcttttgatagcaaatcaagctcctcaagtaaatgttcgatagctttaagagggcggcctgttgtaataactactttaatacctttttcgcgaactgccttaagagcttctttattttctaaactaacctctttttttgtattaaagagggtgccgtctagatccaaagctagtaatttaatctcagtcattcctttatcataccttccatataagttattactgattgttcctgatgatgagggatgacttcatctgcaagctctttaatttccacacgcgcattttcaggtgcaatagcaacgtctgcaaaatccatcatttcaaagtcgtttaaattatcaccaaaagctaaaacatgttcagattttaactttaaaacttggcagagatggctaagaccaaatcccttattggctccccgtaaaataatatcaatagactcgaatcctgttgttacagcttgaatatgcgggagtctttcatttaaccaagcagctcctttatgaacatattccgctggaaattgagttgtgattttaaaaatagcatcgtccaactgttcaaaattctcaactaactgaatattttcgtaataccctttcatgaaatcaatataactctgaggactctccgccaaaatataagcggcctttttaccggataagagtaattcaacaccttggttatatggattttccaaaattttagccgttaaatccagatactgagagggagtcattaactgttcaaacagcacttgatttttatattgaatcaaacttccattttcagctataattgcaatacgatctgtaaaatccttgaacaatttttctaaagtcaatagcgaacggccactggcaatagtgaaaataagattttttgcctcaaattttttcaacaaatcatctaagcgctgatgatcaaactgaccggaagcatctaaaaaagtaccgtccatatctgttgcaatcaagcgtattttttctgtcatgaaatttcttttagtaaccatcttacttcctattttatcaaaattattaatttttgggggattattgactaaaatagcttactttcaattttttgtccacttcagtttaaaaagttcttttttgaattgtcggatcaaatgcttaactgctttaaaattgctcttgcatccactagcatagagtccttttttattaaaataacttttttgccaatcctcttctgatgctgcttcgatttttttcaggatatatttaggtgccgtaaaacgtaaatccttagtggcaataaccgcgtctctaaagagaggatcatgtgatttggtcggattaacatctaactcccaatgacgttgattgccactgttagcataattaaaactggcaccattaataatcccattttgcgtgatatgttcagcatcaatttcattcaagaaatgtccttcattatcaagaataaattccgtatgaaaatttaataacaccttaaaattaaggcgataagagtcatctggataaatcatctgtccatccttaaaagcaaccttattatgcagacgggcagaatcataaagtgtgtaatcataggttggatgataccaaacttttctctttttctttcttaaaaaccgcgccaaagcctgagaatcagtcattttttcatttctcaaatggtcacgaatccactgcgcctgctgactggaaatgacatagcgaaattgatggatacgtttggcaaaattagtcttagcactgagtgtgtcttttggaaaaatctcttgaaccagaagtgaaaactcatgccaaaaagtattgtctggtgctaaatcgtcagaaaaacgatgaactaactcttgattttcttgtaaatcaccagataattcttctggcatagcagccatatctagaacaatagacagcagtttttgcggctctttattaccataagcagcttgccataagaaattaaaagcctgtgagccaatgcgaaaggccgaaggctgcaaatcctttttagctaattgctttacatcttccctagtccatcctacactttcccataaaagcagttgctttgcttcttgataacgtttgcgcagacccgtttgggaaaatgaagagtttcctaaaatgcgccacatagactttctcctttcaaaaccttattataacaaaaaagagatgagacaacagaaaaaacgagattattaaataaaatcactgttttcatttccttgtcagtagagcatagtcactttaaaataatagggcattattgatacattgaatggcacccaatgaatatcttttttaagatcagaattttcacataactttctcacaaaatgattgtaaaatctgattttagtccaaggccaaattttttcttaagttaaaattaagttcttctggttacaatctgaaaaaataatgatagaagaggaaatattatgcgctattcacaaatttgtcgtaaaagtttggctttgctggctacaggaatgattttaactacctcaaccttacctagtataagtattctagctgaggacagtactggagcacctgctaggccagatggacaagctcctgctggaggtggtgctaacaccacaacttatgattacagcggaaccaacagtggtgttctagttgctaatggtagcaaggtcacttccagttccaaaaccaaatcaactacttccgcccaaaatacagctcttgttcaaaacggtggtagtttaacactgcataaagcgaatttaataaaatccggtgatgataacaatggtgacaatgataatttttacggtattaattctattttactagcagtcaatgaaaggtcaaaagcttatgtttcgaattccaaactaaaagctagtagctctggcagtaatgggatttttgcaactgataaggcaaccatctacgctaataaaacaagcattgcgactacagctgataattcacggggacttgatgccacttacaatggcaatattattgctaataagatggccatttctacaaaaggtgctcacagcgctgctattgcaactgaccgtggtggcggcaatatttccaccactaattccagtttaaatactagtggctctggctcacctcttctttattcaacaggcaatattcaagttaatcacgttacaggaacatctagtaacagccaaattgctggtatggaaggtcttaataccattcttattcataattctaatttaattagtaccatgacaaacaaaactgccagtgacccgattgccaatggcgttatcatctatcagtcacaatccggtgatgccgaagcaacaacggggcaaagtgcccacttcgagctcagcaagtctaaattaacttcttccattacttcaggttctatgttctacctgacgaatacctctgcaaacattatccttaatcaatccaccttgaattttgatgcaaataaggctaaacttttgactgtagcaggcaatagtgccaataattggggaacccccggtagtaatggggcaacagttaactttactggccataagcagacacttaaaggggatgttgatgtggatagtatttcgaccttaaatatgtacctgcttgataaaaccaactacactggcaaaactgctgtatcaaccaacagtaccaatatatccccaagcacgtctcctattaccatgaatatttctaaaaattccaaatgggtgctaactggtcattcgacagtaaccaatctcaatgctgaaaaaggtgctaaaattgttgataaagacggaaaaaccgtcagcgtcatctcttcaagcggacaaaaacttgttaaaggtaaaagcaaatatagcctaacagtcacaggaacttacagtcaaaaggtaacaaccagctcaagtaacaaacccagcagcagttacattaaccgtagtgacttcgataattattttaaaacaacaacagcctttgtaaataataccaaaaatacaagtaattaattaaaaacgagaatgagatcaaaatcgtgatttcctaaaaattgattttattatctcatccccaaattactgcatcaaactgttatcattgttttatctaacgaggttggcacttcttgtcctaacctcgttttgactgatacctaaatctctttccttcttttaagcaaatacagacaataaaggccaagtaatcccagaatagctaggtcaaaagtgaactgccagccaaaaacttgaatgcgattcctaaaaaggctagtcaatagaaccagcatagcatctccccaaaaggcaagaccagccaaaatcagcgctgattttcttctaaaaagatagaaaattggactcaagacgccacctgacaatgaccgaaccacacgatcacaaagaaaatcggatagttggtaaaataaactttaacagctgaagtacagtgttcagcaaaaaagaagcctgttgggacttggacttctcatactatttcttcagcatcactggttttaatttgcaggcacaactgggaaatagaccactattcaaagagtatttgagctataccgactgatatgactcatttgtccctgacgagactagattagtcttttttcttaaaaatgtggttcaaccattcaaagacttggtaatgcatgagacggaaattatttacttgacaatgcgcatccgcaccactttcgcttgaaaattttcttaaggttacatcaatacctctctgtttaaaattgtcgtaaagaacttgactctgtctcatcaattcagaatcttccccagctcctactaagaaaaggctaggaacgtctattttgttatagtctactatttgagcttgttctaaaacttcatttacagaagttataaaatcgacttgtccaaattgccaagcgtatttgtttaagttgacttcggcaaccttattgacacttgttaccagcttgctgccccacttaagaatcgttttgggagcttttagtgcagttgaaaatgaaatccgaaagacctcggcgacatcataaattggagtggaagcaatccaggctttaatgcgtttatctttttctactgcctgagctgtaaaataaccaccgccgctaaaacctgcaatagcgattttttctgtcggcgcttgataccaatccaagatagctgagatggccgccctagcgtctacttcaaaatgaaggccttgatttggattttttccttgaccgggtagatcaaccattaagacattgtagtcatgttcccagccagaataacccaacatataaaagagatcttcacgactggtatctccgcctccgactacaatcaaagtatcttgcgctttatcttcggaaataatagcataacccggtaaaagttccccttcaaaaggcacctcaatgctcttaagcggaatcttgctgttgtctacagctagcataaacagtttttccattcttcggaaattttccataaattcggaatctttgggatctgtaaactgaagagccgcacgaatggaaaaacaggctgaaaaatacaaatgagaaattaagtctcggtaaccaaccttttttactcgctccacctcatcttccagataatcagcatgctcattgaagcgtttgcaccaatcggtaggattaccatcccgaataccgctggcaatataaaataattcaccagcactcatcccgataatttgaccaattccaagcatccaattaaaacagaaatccatatctttattattaaacttaattttataatcttgccgtttcaaaatagtattgttttctttcattacttaagatctcctttgtttgcttttgttccgaactaattgaactaaaatagtaaaagaaaatcttaactctttcctttatcaaagtcttctaaaacttggttaacaacagcatctaacttatcatagagatgggcaagtgttctaaattgctctccataagcagaagcatggtaatcagctactttattaaagagattcttcatctcttcaagcactattatcctagaagtcagccaagcaaccattcccataggatttaaatgaataaaacgttctctcgaatgcaagcggccttggtagctgatcattcccttattctccagaaaacgcaagcccgtgctagtgctggcttttgacagaccaagctgatcaataatcttattaaaagtcacactatcttcttcttccaacatgagataggctaaaatgcttgaaggcgtacgcgcataatctagctgcatgaagacattggtaatattttcaatatcttttagttttttctcttccatcatttagttcctttagttcattacaaacaaaacttatcactttagaccagccttgtcaagaaaataatatgcttttattcaaaaataccaatattcaaattgccctaaagagagtctgaagtcaatctaatcttgaactgattccctcgatctgacttcctgtattcaatttagagggacagcacagttcagtttctcttttccgattttgactctcctttaagcaaatacagacaataaaggccaagtaatcccagaatagctaggtcaaaagtgaactgccagccaaaaacttgaatgcgattcctaaaaaggctagtcaatagaaccagcatagcatctccccaaaaggcaagaccagccaaaatcagcgctgattttcttctaaaaagatagaaaattggacacaagacgccacctgacaaatgacagaaccacacgatcacaaagaaaattggatagttggtaaaataaactttaacagctggagtatagtgttcagcaaaataagtctgattgcgcgtcattaccatgacaaaatcataacaacctatcagattcaggaagaatatgaacactgcaaagccaatcccaaaaccagttaattttttcatttcattaatcccatttcttcaaaagcttgaacaaagaaatcgctatgcattaaggccaagccttgattaacatcacctaagaccatcagattatctcctttttggatgttaaaaattttcctagctcgtgcagggataacgatttggcctttttcaccaacattttttgccccgctttcatcaataaaagacaattaactaatctactctactttacaaatcaatttcttcaaaattttttatagatttttgatatgataaccatgtacataacataaacaagacgacaccaattacgaatatagcaacctgtggtatgcttacgtttgaaagctcattcaggctctctaaagcaggaatatgatgtaatatttcccccaagattactataataaaactgactacgaagaatatgataagaggttttccaatcttgtaagctgttttaaaaaagcctacaagaaaaatgccgttaaatgctgcaaatacaattattacatatccaagataagccgcatttgcattcatcaagggatttatatcgtaaggagcggcattccctaaaaatttcattctgataatcgttagcaatgtacatgagataaaagccatcaattcaataaacaaaacaaatagatatttggctgtaactacgtcttgtttcttaaccggcaacataaccgtgtatgttatatcatcatattctctcaactgctggtaagtataaaaaattccaagacagataaaaacggaaccaataagtataggatagcttggaatcattgtcatggctgaaaaagcaataaaccaataactcaacgggtttgctgttagtttcaattccttataaaaaagttttttcatcacagattcacctcttctctttcgatatgcaccataatatcttcaagtgtcggtgtaccacctatttcttttgcgtaataatggataaaatcttctttctttgtcgataaaagtaattctccatttttgatgtaggtaatcgtatccgcacatttatctaaatcactggtgatatgggtggaaaataaaatagctacaccttttttagccagttttcggaaaatttcattcatctcatctctagatactgggtcaagtccacttgttggctcatctaaaattaaaagttttgcatgatgtgaaagagccaaggtaagataaaacttcaccttcataccctcagaaagctccataatctttttattttcgtcaagattaaatgcagtgagataatgttgatactcctcgtcatcccaactattatagaaaacacgagtaattgccacaatttcttttatctttttccttttataatagctgactccacctactgcataaccaatctgctgtttaattttatcctcattatccagatagttcattccaagaatacgaacactgcccgcttcaggatgtacaagatttagaatagattttagcgctgttgttttacctgcaccgtttctacctatgaatcccataacttcgccagcctcaatatgaaagctagtagtttttagttcaaaagctggataaattttcgtaagaccatttacttctagaatatatctcatgtcattcgtcttctttctcttcaaaagctacttccatcaagtgtgtgaatgctccctttggcggtatagcaatacctcgtttttcatcgccaagaagcaaaattgtatcaccaggcttgatattaaatacttcccgtgcctgcttcggtattactatctgacctttttccccaactgtagctgtccaagcatatttaccttttggtgttttcacgatgatcggcctccttatagtatgttttgtatgatttgtataacttattataccatataatttcaaaataacaagtactcatgatacattataaaacttactactgttacaccaatatacttaacaatttcaaaaatttttgtattgggataagttaaagatgattttttccgaaaatggactgttgctatttttgatttcagatgagtattattatgatatttttatttaaaaaaaataccaaaaaagaagcctataagggcttcttctagaaaatgagcatgacttttccattattcccagactttatagcctgtgctagagcttcctgaacattattaaaagaatatatctttgcaactctggtttctatctttgcttccgaaacaaaatggacaatttcttccaagtcttccttgtttactctaacgtaattatgttcagcaaaagaagtatgttttagtacttgtggattaatctgttcatcgctgacagtcacgagtcttccacccttgtggataacatcaatacgatttagtacacctgccgtatcaaagacagcatcaaattcaggaataggatcatcatttgtataaatttctgtgtctaataaatttatgctcattttttgatttttatttcttactaagccagatgctttaactcccattttcagagcaaattgaagtgcgtaatagccgacactgccagctgctccggtaacaagtaaacgttcgccgggctctagtcgtaatcttcttaaagcttgcaaagccgttgaagcggctaaaggaatactgcctccactgataaaatcaatattatcaggcaattttacaacctgattctcagaggcagcaactaattgctgccagctcccttgtggatgaaaagccaccacacgctcaccagcggaaaaatttgaattcttatcagcttctattataatcccagcaatatcccaacctagaattgctgggaaagaaggaattttctgaatcgtttccggcgtcatatactttatgtctactggattaattgaagaggcaactacttgaatcatcacttctcctgctcgtctaacgggactgctaaatgttcgaaccttagcaacctccggtccgccataattcactatttcaatacctttcatttatgccatcctcctttaaatgataaattttcatcaatcgctcttttaagcgggatttaatctgttgtaaaatctgaatttgatggctaacttctttaagcttatcctcataaatcataataacatctttacacataaggttcttatatggaaaaacaaagggatcacaacccatgacctgctgcatttctgctgttgttaatcctaaatcaaaatataattttaatgtcttaattcgctctagcgttaatttatcataatcacggtaaccgttctctaatctttctggatggattaatcctttttcctcataatagcgcaacgatctcatactgacattcgtcaatttagaaacctctccaatcctcatttcttttcctcctcgtactgtcattatacagcttaacatgatgtgaaggtcaacgaaaaaatctattttttattaattcactcaaacctgatgatctcgctctgttacacttatattttaagtaaaatgataacacgtatcatcaaagcgagaccagacccccatattgctatcgtctcttatgacaatagccaaaaacttctttaaagcaattttcacttacttctgctacaatgaagctatgactaaacttgcaattatgagtgatttgcatattgatcttaatcactttgggactttagaaattgaaacgctcaaacaggttctgcaccaacaaaggattgaccatcttcatctggcaggagatatttctaatcatttttacgatgttacacttccttttattgaagaacttgaaaaagacgtcaaggtaacctataatttaggaaaccatgatatgttagatttagatgaagatgccattcaagcttctgattttcaagttcaccaaattggatcggcttttctattagcttttcatgcttggtacgattattccttttcccatcaagaacaaacaaagattaacagcctcaaaaagaccttttggtttgatcgacgcctgcaacgcctcaaagatgatctgacaattactcaggagtcacttataaaactgaatcaaattctacattctttaccaagccaaagacttattgtagctatgcattttgttccccatcaagaattcctgatgactcatccacgatttgcaccttttaatgctttcttaggaagccaaaaatttcatcagctttttgttcagcaccaaattaaagatgttacctttggccatgctcatagaagttttggtgatgtcaaactagacggtgttgtttaccactcaaggcctctaggctatatccgtgaatgggatttgaccattaattttgttaatcagcatccccaatacaatccttcaggtagctggaatctcagtaaacgttataatgccgttaggtatttagaggattatcaagcttataaaagaaaatatttagccaaagaattttctcattccatgacgatttttgactgttaaaaaacgagactggggtagaagtcctaggagcgctatataaatagccgtaacagtttgaagcagtgagtgattggaagcttcacattttgttttttaggttcaaagccttaacagtccattgagcttttaaagtatctcttgtcccgcaaataatagtttcaacagtttttcaaactgttgaaactagtcataaatcaaccatgcggaagtagaataatcttatccagtagatgtttttacccgattcttaaaacaggagagtgaggaaaatcaatttctacgaaataccgattgagccccgctttcattcttttttagtttgtaatgattttctgagtttaacagcttcttctggtttatctgttataattccttctatcccagacaaaaagaattttttcatgtcatcatcattattaaccgtccaaagccgaaatggttttttattttttcttttagtcacttgattttcataaaaagaactgtgtgaatggacagtcttaataaattttaactgttgtgccaaccaaaaatgaaaaggatgaaatttcattaaataagctaactcagccttaggatcatgttttctcattacatataaactaaaaagattaaaactagaataaatatgcgaaaaagaacgttttttagcctgcatagtttgtgcaatttgcttttcaattttaggataaggatatctattggttttgatttctagattgagagttccctgaaaaccagactcttccaaaaaatttaaaacttcttctaaggttggaattttctcacaaaaataagctggatgaaaccaagaaccagcatcaagcattcttatttgctttaatgtcagttgtctgaccaatccagagccattgctggttcgatcaactgcttcatcatgaataacaacaaggtgattgtcttttgttcggtgaacatctatctcaatgccatcacaccccacctgaatcgcctttttaaaagcagcaagtgtattttccggacaatcaactttacttcctctatgagcaaaaatctgagtcatatctctcttttctaagcataaaatttattatattttaccataagatgaaaagcttagcataaatcaaaatcataaaaaatgactggagtttcaataccagtcattttttctattaaatcgctttttgatcttgaccaagtacccgttgaatggcttttacaatttcaacaataacaaacatggccaaactgcctcccacaacaacacaccattgggtcactgacaagtgagacacatggaagaatctattaaatcctggaatgacaatggtagcaagcataataatcaaagcagtcggcaaagcccagttaaatgttttatttttaaagaaaccaaccttaaaaatggactgataaaccgatttgacattataagcatgtaccaattgaatcaaaccaagtgttgcaaaggccatggtaagagcatctgcatgaatttctgtacgtgtcgcatgttcaggaaagaaaactgcccagccgtaaacgccaagtacaagaagagtttgtagaataccttgatagataatggctcccataacaccacctgagaagaagcctgacttgcgtccacgaggtttatgggtcatcacaccaggctcagccggttcaacaccaagagcgatggctggcagagtatctgtcaccaaattaatccagagcagatgaacgggttgaagcacatcccaaccaaagagagttgcaaagaagatggtgaaaacttcagccatgttggcagatagcaggtactgaattgatttttggatattggagaagaccttacgtccttcttcaaccgcaacaataatggttgcaaagttatcatcggcaagcaccatatcagaagcacccttagatacttcagtacctgtgattcccataccaataccaatatcagccgttttaagagatggcgcatcattaaccccatcacctgtcatagcaacaatcttaccatcattttgccaagccttgacaatccgaaccttatgctccggtgacacgcgcgcataaaccgaatactgtttgaaaactttttggaattcttcatcagaaagttcattgagttcagcaccagtgaagacatgatcaattccatcatcatcaataattcccaaacgtttggcaatggcttcagcagtatcttgatgatcacctgtaatcatgattggacgaatgccggcttctttagccacatgaacagcttcagccgcttctggacgctctgggtcaatcatccccacaagaccagcaaaaatcaaatcattttcaacgactgccgtttctaattttggaatttcagactcgtatttgtaagctatcatgagaacacgaagcgcctgtttggcaagcgacttgttcatatcaagaatggcttttttatcgtcctcagtgattggacgaatactaccatctatctcaatttgcgttatacgtttgagcaattgatccggtgctcccttgacagcaatcagatatttctcaccatcaagtttatggatagttgacatgagctttcggtcagaatcaaatggcaattcagcgacacgtggttcagctttaagtacttcgcgaatatcgaaattatgatcaaaaccatattgaacaagagctgtttcagtaggatcaccaattaatttaccattggcatcaaccttactgtcattagcaaagttcataacgcgaagagccatattattaacgtcaatgtcatcattagcatcaactaatctaccattataatagactttctcaacagtcatttgattcatggtcagcgtaccggttttatctgaagcaatgatttcagtagaaccaagcgtttctacagctggtaatttacgaacaatggactgacgtttggcaagtgttttcgtaccaagtgaaaggacaactgttacaatggctggaagcccttcaggaatggcagcaacagccaaagcaacagcaaccatcaaaccttcaagaggctcttcatgacgaacaaagataccaactaggcaagtaataatcgcaataataatgataacatatgtcaataccttggatagattatctaaactctgttttaatggcgtatctgtttcatctgcattagctaacatgccagcaatatggccgacttctgtgtacataccagtattggtcacaacccccataccacgaccataagtaacatttgaattttgataggccatattcaaacgatcaccaataccagcatctgatgcaattgcaacagttacacttttttcaaccggcacagactcacctgttaaggctgcctcttcaattttcaacgaagctgcttccaaaagacgcatatctgccggaaccacatcaccagcttcaagaagaacgacatcacctgatactaattctttggaatcaatttcagtaacatggccatcacgccgaacacgtgcatgtggactagacatagattttaaggcctcaatggctgcttctgcctgtccttcctgatagacaccgaaggctgcatttaaaacaacaacaactagaataatgatagcatccgttagcccccccattccttcagtgataaccgaaagcgctgcggcaacaagcaaaatgataatcatcaaatccttaaattgatcaatgaatttggcaagaatagtacgtttttcatcttcttccaattcattgtagccataatcagctaagcgctgtttagcttgagtactggtcaatcccttcttagaagattctaggccagataggacagttttttcatcttggacgtaaaaactgtcccttttttgttttttgaacaaaataaattctccttctcggtctttaaaagaaaaagacctgtttaataattaaacaagtctcgctatttaatatgttgccggaaaacagtttcggattgacgacaacatcacggcaaaaccgctagctactcccttgataatcttcattataccataaataaaggccttttcaatataaaatacctcattttgaagaagcctgttaccctttcaaaaagcgatgcttagctttttaagattttcccagaaattggattataaatagcattcttatagaatgattcaacagaaaaacaatagttaagagtcatggtaaaaccactcataaaagtgtttttttataaccagctgctgaactctttctcaaaaaatattgtctatggaacctctttgctgtttttaaaaccaagttaattctaattgatattttgcgaaaatattctgtgattctgaatctggctgtttaagaacatagtcaagcttgatagagtgatttgttttatcaaaaataaatttactggtttttgtcatgaaatgttgaatacccataggcgttggaatagtcaccaaagcttgtacttctctatgaaaacgtaagacggattttggatttgaaaagcgtgtcataattaattcttgatcattacatttaatcacaactctttctttttcttcattgacaaaaataaagtaagaaaagccatttttctcggtcacatcaaccggatgggtttggtctatcacttctctttgaccatctagatcaatttcatttctcaaatgaatctgcatatttctccttcaattcattctatgtttagattctggctcttataccaatcattaacttacactatcttcttataatagaagaacgcaacaatgttgcacccgtaaagaaggcaataaagacaactaaaatcttgagattgttaatgtctaaattactgagaaagaaggctgctgttaaaacgccaaggatgccaccaataatgatgccaaaggtccccggccaatgaacacggtcagatttaataaatgctattgaactggctgttaaaatcatggctgcatccaacatcataacgggcaaagcaatggaaggattgatgcccatcaaagaaaagaaaatcaattctggcgcataattacccaatcccatagtcattaacatgccaataataaaatcaaaaataataccaactaaaagccaaatgccttttagaccacgaatctgagaggaaatgcctgctccaggattggtcagcatgcggtaaaccatgaccaaagctgcaataatgagcaaaattcccaaaacacgttgaacctgttgagtattccaatttttggttatccgtgttccaacaaaggctcccgtaaaagaggctgctgccatacaaaccagagtagtaatgtccaccttgacaatagtcacaaaacaaagtgcctcaaccaaaacaggaacaacatgggcagttgacatggtggcaggtattttacgatcatcttcaactaattttgtcgctttaaaaagtgttgtcgtcgtcgcaaaagtcccaattcccaaagtatctaagagatctgtcacataaccaatccaaaaccctgttaaaaatttctcttttaaattaatttgatgctgtcgtgcatgtaataaaatggttcccattatccaagtaatcagactgatcaaaagtaactgaatggtatttaatattaaacgatttgtcattagttcattataatgtaaatttaggaatccgtaaatacaaaaagaaattttttttctgtttacatactttctaaaaaacggtatctcatggaaattttgttataataaagctatgaaagaaaaagtattccgagatcctgttcataattatatacctgttgaagatgagctcatttatgatcttatcaatagcaaagaattccagcgactgcgtcgcattaaacagttaggttcatctagttttacctttcatggtgctgaacacagccgtttttcacactgtcttggtgtttattatcttgccagacgtgttaccaatatttttgataaaaaatactcagacatttggaatagtaacgaatctctcttaaccatgaccgcagctcttttgcatgatattggtcatggggcctattctcatacttttgagaggctgtttgacactaatcacgaaaccattactcagcagattattttaagtcctgaaacagaaatcaatacgattttaaggcgtgtctcaccagattttcctgacaaggtcgctagtgttatcaatcatacctattctaacaaacaggttgaacagctcatttccagccaaattgatgttgatcgcatggattatctcctgcgagattcttactttactggtgctagctacggtgaatttgatttaacacgcgtcttacgcgtcattcgtccaattgaaaatggtattgctttttcaagagatggcatgcatgctgtcgaagattatattatcagtcgctatcaaatgtacatgcaggtttattttcatccagctagccgtgctatggaagttctcttgcaaaatctactcaaacgtgcaaaatacctttatcccaaagaaaaagaatttttcactgttacatcacctcatttaatccctttttttgaaaatagggttaccctagaagactatcttagtctggatgacggtgtcatgaatacctattttcaaacttggatgcaaagtgcagacaaaatcttatctgacctcgctagccgttttatcaatcgcaaagtcttcaaatcaatcacttttgatgaaaaagatctctcaaatttagaaaaactaagagaaattgttaaagaccttggttttgatccaacatattatactgctcttcaccttaattttgaccttccttatgatgtctacaagccagatgttcaaaatccccgcactcaaattgaaatgttgcaagaagatggctccattgccgagctgtctacactatcacctctagttcataccttatctggtactacgcatggcgatcgtcgcttctactttcccaaggagatgcttatcaaagatgatctttttgtcgaagctaaagaaaagttttctcactatatcaaaaataagcatttttacaatctcagagagtgaggtttaagctattctctcttatttctttaaaactattgcaagcaagtgataaatatgagaaaaatcatttatggactaattgtttagaaataaaattaagataggaaggaaattttctgataacattttgcttcctatctttccttctccgcttgctttatcaattaatccccacacaacatgacaaataagctaatttttagtaagatagtctgtagaaatttgtaattagaaattaggaaccagtatgtcaattaaattggttgctgtcgatattgacggcacattacttaatagtaagcgtgaagtaacacctgaagtttacactgctatccaagatgctaaaaaagccggcgtcaaggtcgttattgcaacaggccgccccattgctggtgtaaccgatttactagaaaaattaaatctcaaggatcaaggagattacgtgattacttttaacggtgctttagtacaagataccgcaactggtgaagacttgattaaagaaacgttaacttatgatgattatttagatattgaattgctcagtcgcaaattaagtgtgcacatgcatgctatctctaaagaaggtatttacactgccaatcgtgatatcggcaaatacactgtccatgaagcaagtttggttaacatgccagtctattatcgtactcctgaagaaatggttggcaaagagattgtgaaaataatgatgattgacgaacctgaaatgttagatgctgctattgctcaactgccagccagcctttatgaacactacacagttgtcaaatcaagacctttttatttagaaatcatgaataaaaaagtcagcaaaggcactgctatcgttcatttagcagaaaagttaggacttagcagagatgagacaatggctattggtgatgaggaaaatgatcgtgctatgctagaagctgttggaagccctgttgtgatggaaaatggtattcctgaactcaaaaaaatggctaagtacatcaccaaatcaaacgacaacagtggggtcgcttatgcaattaaaaagtgggtattaaactaatgtacacatataaaatcggaatttcaaaagaagaacatgataactttatcaaaaacagcggtcaaaccaatctactacaaagcagttcttgggcaaaagttaaagatgaatggggaaatgagcgaatgggtttttatcaagatagcaaacttgttgcctctgcctctattttaatcagacctttacctcttggtatgacaatgttttacattccaagaggtcccgtcatgaactatcaagataaagatttggtgaattttgtattgacctccttaaaaaagtttgccaaaagaaaaagagccctatttattaagtttgatccttttattttgctgaaccatcatcaaattgatgaggaagccatcaataacccgcaagcacaaactattattgacactttaaagcatttaggctgtgaatggctgggacaaacaagtgatatgggagaaactattcagccgcgtttccaagccaatatctacgcagaagggttctctgaagctaacttatccaaaaaaatccgacaatccatccgtactgccaaaaataagggagttagcattcgctttggtggctatgaacttttggcagacttctccgatttaatgaaaaaaacagaagatcgcaaaagcattcacctcagaggcattgattactaccgcaaactcttagacaattatccccaacactctttcattactttggctagtctcaatttgaaagaaagacttaccgaactagaaagtcaaaggaaaaaagctcaaaataaccttgctaaatttggtgataatgttaaaccgagcaaaattgataatacaaaaaaagaaatcgaacgtctcagtgacgagattgcctttcttcaagagcatttatcccaaggtaaagataccgttcctctttcaggaacattatctcttgaattcggtaaaacatccgaaaatgtctatgctggtatggatgacgaatttcgccgttatcaagctgctatctatacttggtttgcaacggctaaccatgcctttgaaagaggcagtcactggcaaaatatgggaggtattgaaaatgacctctctggcggactttacaacttcaaatcaaaattcaaaccagaaattgaagaatttattggtgaatttaatttaccagtcagcccgctctataaattagctaatattgcctataccatacgtaaaaaacgaaggagcaagcattaataatggctttacaaaacatctctcaaaatgattttgccttacatgttcaaaaagcagagcaaaaatctttcatgcagaccttagaaatggccaagcttctttccaaaagaggatttacgcttaattatattgcttggttagaaaatggaacaattgaaatttctgctattttatacagcatgcccatgactggcggccgctattttgaaattaattgcggaccagttgtcacacgagataagcatctaacagatttttacagagaactaaaagactatgtcaaagaaaaaggtgctttagaattagtaataaaaccttatgacacctatcaaacctttgatggtgatggccaagcaaccagtgctgaaaaaaaagaacttatctcgcaattaactaatctcggttatcattttgatggcttgcagagggattatcctaatggtgaacctgattggcactatgtcaaagatttatcggatattagcgaacaaacactgctaaaatccttcagtaaaaaaggacgccctttagtaaaaaaagccaaaactttcggcactaaacttcgtcggcttaatcgtgatgagcttaacctctttaaggaaattacttcagccacttctgatcgcagagaatacagtgataaaagtctggactactaccaagacttttacgatagttttggaaataatgccgaatttatgattgccagcctcaactttgaaaattatcttagtcatttacaaagggatcaaaataaacttggcaataaaattgctaagttgcaagccgatttggaaaaaaatccgcattctgaaaaaaaacaaaaccaattgcgtgaactgtccagccaattcgatacctttacaactcgtcaagaagaagctcagaaatttatcactaaatacggcaaaaaggatgtcatcttagcaggcagtctctttgtttatacacctcaagaagccgtctatcttttctcaggttcctatccagaatttaataagttctatgcgcctgctcttctacaagaacatgtgatgcttgaagctcttaaaagaggaatttctttttataatctccttggtattacagggcactttgataattcagatggtgttcttcgtttcaaacaaaatttcaatggttacattgtccgcaagatgggaacattccattattatccaaatcccttaaaatacagacttttaaatacgattaaaaaaattctaagacgttaacctgttttcattaaacagtctaagttttgtcttcagtctaaaagaagcaccttcaatcaggtgcttcttttgatatgatagatagttataccaaaaaacactgctgatttttatcaacagtgtttttaagtatgaaatgaatttcttgcaggtttaaaagttaaaatacaagcagaaaatcatcaattctaattagctgctcagctcagcttatttgacaaagtcaagaagggcaaggaaactgtctgcttgcaatgaagcaccgccaacaagagcaccatcaacattttctttagccatgtattctgcaacattttcaggttttacagaaccgccgtattgaatacggacagcctgagcaacttctttcccataaagtttttcaacggttgcacgaacaacaccacagatatcatctgcaatattagcatcagctgacttaccagtaccaatagcccagattggttcataagcgataaccatacttgatacttgctcagcactcaaacctttaaggtcagcagtgatttgtccttcaatccattcagctgttttacctgcttcataagtttcaagagattcaccacaacaaagaattggcgtcatcttgtgcttaaaaatagcatgtgcttttttgttaatctcttgatctgtttcatggaagtaatcacgacgttctgagtgcccaataataacatagtcaacaccaagtgctgcaagcgctgcaggacttgtttcaccagtaaaagcaccaaaatcttcccagtaacagttttgagctgcaacttgcaattctgtacctttcacgccttttttcattccttcaaggaataatgcaggtgatccaataacagtatcaacaagattatttgaaggaatattgttcttaactgcatcaatgaactcacgcgcttcagcagcagtcttgttcattttccagttaccagcaataattggtttacgtgacatttcacttacctcttctataatttttttacctgtctattatatcacaacttatctatgaattctataataatgggaaaatctctacaacccttttaataaaatttacagcactttttactcttttcgttaaataaatccttaggaagcacctatactaatcactcatatcaagagtttaaaaacacgaactcatctcttttatcaatcatactgtataaaaatagaaaaaagcctctttcgagactcttttacaattattgtctgacgaataattgctaattgggaacttaatttcttaagcttcgatttctgaaacgataccagaaccaacagtacgtccaccttcacgaatagagaaagtagtaccttgttcaacagcgattggatggatcaattcaacgtcaatagtaacgttatcaccaggcataaccatttcagtacctgctggcaactcaattgaaccagttacgtcagttgtacggaagtagaattgtggacgatagttattgaagaatggtgtatgacgtccaccttcctctttagtaaggatataaacttcacctttgaatttagtatgtgggtgaattgaacctggtttagcaagaacttgaccacgttcgatttcatcacgttggataccacgaaggagaacaccaacattatcccctgcaataccttcatccaattgtttacggaacatttcaacaccagtaacaacagctttttgaatgtcatcacggataccaacgatttcaacttcatcgttaactttaacagtaccacgatcaatacgtcctgaagcaacagtaccacgaccagtgattgagaaaacatcttcgactggaagaaggagcggcttgtcagtatcacgttctggatctggaatgtagtcatcaacagtatgcattaattccatgatgatatcttcttgagcagtatcgccttcaagagctttaagagctgaaccttgaataactggaatatcatcacctgggaaatcatattctgaaagaagatcacggatttccatttcaaccaattcaagcaattcttcatcgtcaaccaaatcaactttattcatgaagacaatgaggtatttaacaccaacttgacgtgaaagaagaatgtgttcacgagtttgtggcattggtccatcagttgaagctactacaaggatagcaccatccatttgggcagcaccagtgatcatgtttttaacatagtccgcgtgtcctggagcatcaatgtgagcatagtgacgtttttcagtttcatactcaacgtgcgcagtattgatagtgataccgcgttcgcgttcttcaggagcagcatcaatagatgaataatcttttggttggtttactgcacttggaagacgacgtgccagtacagttgtgatagctgcagttaaggtagttttaccatggtcaacgtgtccgatagtaccaatgttaacgtgtggtttactacgatcgtatttttcttttgccatttaggaaaagcctccaataaaatatattttatagatagacagtaggcatacagtctaactttaccttactattttaacaaattacgttaaaaatgcaagtattttataacttttttatcttatcttattaacaattattcctaattaaagaagtgactttcatttatttagaagcttttttattataactaaaaaatcggaaaaagtatccaattgatttattctccataagtctcctgttgcgattgaggatctataaaaacatctgtatcatcacgctcggcttcttccacttcctgataaatatcttctcgtttctcattagcatcaatatttaatacaaaaccaatagctaccgacaaaacaagaagactgtttcctccctgtgatagaaagggaaaagttacacctgttgaaggaataaggccggatattccaccaatattgacaaatacctgcatcagcatcatagaaccaatacccaaagcaatcatggagttaaaaggatttttagctttaacaccaactagcagaatacgcaaaatcaaaaagaaaatcaaggctaaaatgagtcctgctccaatcagtcctaattcttcaataataattgaaaagacaaaatccgtttgtgcctctggaagatagcctcgcttttcaatagaattgcccaaaccacgtcccagccaaccaccattactcatagcataataggaattagccaactggtgtccagagtctgtcacatccttaaacggattgaaaaaagcactaaagcgtttagcaacatagccaaaaactggaaccttgctcatcgttttaacaccaaccatattgatgagacctaagaagattgctgataacgtaataatcccagttaataaagcagaaaaccaacgatagccaataccactgactgaatacataataatagctgttaaaacaataatggtcgcatttcccaaatcgggctgtgctgcaaccaaaagaatcaaaactaaagaataaaaacgccaatcctttagatcactcaactgcttcggccaccatttacgtttggtcaaagcttgataatcataaatttcaatagattgctgccgcctagcaaaggtaaaagccaaaaaccagaccataataacttttaaatactcagccggctgaaagctgatgggaccaataactatccaaccatgagcaccattaacttcctgtgtccaaaaacgcgcaattaaaagcagcaccacttctatcatcatcataacagttaaaacaccactgttcttcaaaaaatttaattttaagcggtaaataaaaaggatagccaataaactaataacccaaaaggcagcctgatttatgacagaacgaaaaggatttaaaccattttgtattaagctagcactggttgttgaataaacaacaatcaaacctaacactgataaaattaaatagggcaataatatcgaataattcagcaaatgccgcttatcaattttcattacatttcctcaaatatcttacaagtttaacattagcattatatcatcttttaaagttaaaacaaagaaaataactgatgaatcatatcaaactttgcctttaacactttctgattagcatatatctgatgaattttttttattctcttaaataaaaaagaaatgaaaaatctgaaaatttaagaaaatctgctgtttccgatataaaaattagtgtttttatacaattaaaaagctctataacctccgaagcaaatttcatccattacagacattatagagcttttttctgtttaacctgaatttcgtaaaccagttgcgacaccattaatagtaatgtgaatcaggttctctaaattctcacctaattcaccacggcgctgacgtttaattaactcaatttgaatataatttaaaacattaaagtaaggtaaacgataatcaagactagctttcaaataactattatcttctaaaagctgtttgtgactttcaattgctagaataacatttttggttaattgccattcatccaaaatagttgcaaagacttcttttgtttcttcatcctgacataatttagcatattcaaaggcaatattcatatttgatttggataaaaccatgtcaacatttgacaacaatgaatggaagaaaggccatgattgatacatttcctgcaatttagccaaattcttttcatccttatctataaaatgtttaaaggctgaaccgacaccgtaccatcctggaaacatgatgcgattttgagaccatgagaatacccaaggaatagcgcgcaaaccgctgatctctgtaatcgtcttacgagctgctggacgggaaccaatattcaaacttgaaacttcgcgaattggactagctgcgaagaaataatcatagaaatgttcgtttccgaaaactaaatcacgataaatgagattactgtcagcaacaatttcatccatgattaaacgataattgactaagttatctgaattgacaatccttcttgtcaccatgcgatcaagagttgctgaaaccagcatttccaggttgtagtatgcaacatccttattgccatatttattaccaataacctcaccttgttctgttaaacgaatccgatccttgatggaaccaaatggctgtgatgtaatagcctcataagatggaccgccaccacgtccaacagtaccgccgcgtccatggaaaaaggtgattttgacaccattatcagaaccaatttctgtcaattcattttgtgctttgtagagcgcccagccagacgataaataaccaccatccttgttagaatctgagtaacccaacataatttcctgataattatgattggctgcaatccattttttaacaatatcataattgagatactgtctcatgatttcgcgagaattatccaagtcctcaatggtttcaaataaaggaacaatttgcacacgcgccttatctgtatcaaccaagccgacttctttgagcatgatagctaattcaaacatatcagaaatgctttctgtgtgtgaaatgatatgttgtttaatcacatcttctcccagagcatccttcaatttcctagctgttttaaaaatagctaattccttttgcaatatttccgatttttcaacatgcgttgcagacagtattcgaggatcttcagtcaattctttgagaagaatagcaatcttttcttcttcaggtaagtcgctatagttagcaacaatattggctgaagctaacagttctgctacacaggtttcgtgaacactggaatcttgtcgcatatcaatagaagctaaaaagaaaccaaaaacatcaactgcttgcaataattctgttaaatcacccgtaataaaagcagaaccgttattttctaaaagagaatctttgatgagttgcaaatcatttctaaactcttgcgctgattgataaggaaggatttgagcactatcttcagactccaactcttctaaatggttgttttttaaataaataagagtctcttgcaatcttgattgaatataatgaaaagccttacgatagggttctttttctcggtaaatcgaaacatccgttgaacgatctgccatctctttaactgcattgctaatagtagaaaggctggttgaaagagaaaatgttcgataaagatctgaaactttgtcaatataataatttaaaatcacttcattttgcaccagagctgatattttcagggtttcagcagtgacgaaaggattcccatcacggtcaccgccaatccacattcccatcgtaattggtttagcatttcctaaatcaaatcctttttgctgagacaagtgcttgtattctgtaattaatttagtaacacccttaatcagagaggaattatagtattccatgacattagtaatttcattagtgacttttaatttcttttcacgaataatatctgtttgcataatgagctcaacataacggcgcatatcgtcataccatttttgcttgttaatagatccagctttaacatcacggtacttacgcaaaagttcatgaatatgattagttaaatccagcatcgtttttcgctgcacttgagttggatgcgctgttagaacagggacaacattaacattttccagaatttcttgagcatttttttgactagaaacaagttcaatagtggctgataatttccctaaataatcaatatcattattgttttgatagttgatttcataagctaaattgacatcttcagaaatattgataagaagcggtaaaatggagaaataacgagaaacaacgaccatttcttcatttgttaactgctcaatttcacgttctaactcttgatgcttctcttcaattgataattttttaaagagagtaatcttatcaaagctagcactgccaaccattgttttggtagcatcgtccagtagtttggtaagaatagtaatctcctcagcaattgcttctttatcatttctactttctagtttgttgattgtcacgaaacaaattccccttcttttttgatactttatatcatatcacttttagaaaaaaagtaaatctttattcaactgtaagcatcttatttaacacaaaaaaataaagaactagacagcctagttcttacctttataaactttcaaataaaattcaattttatccccatttttgaccttaatcttatcagcagcttttgatgccagcttatcattaacatcaaacatccagtacctacctgcttttttatcctgagtgacaccatcaatagtagtgataaaaccaccgctttctttaactttatagttgtcttttaagacatccataacagtagcaccttttttgaaagcgactttctcatcagttttattagaatccgttttaacaattaatcggaccttaatctcttcagatgattgacttgtttttttcccggtactgctattgctgcaagctaccaggaaaaaaacggatagtgataagacgataacattaattatttttttcatgagacgataacctcctaaagattgataatataattgggtaaaagaacaaagtcgagatagcatgagctaaattaaaagtcattcctgctatgatataggctaaaattggagtagaaaataagagagcagaataagtatcaatcaagataccatatacaattcccattaaccctgccaaaacagactgcagaccaagaccattaatattaccaaatcgaaaaagttttgtcataggataaaggcaaaatttccaaaggcaaataactagaccaaagctgataagttgccccaagacccaaggaccgaatcccagcaaaaaactagtaatcaacatggttacagtcatgattaaaaaactttcccaaaaaccataaaaaacggcacatactagaaagatagcagtgataggttgaatattgggcaaagctgaaaaggcaagccgcaaaacaatagctaaagctgacaaaatagcaatacgactaatttgctttaaggttttcttctccataatttcagtctaccgaaaagctcaaaaactgtcaagatgataaaacaggctaaatgattgaatgttttaagttcatgtaattgtaaatgatgaccatcacctgacctgctattatctttttgcttatctttatataacgttatataatgttgttagctcgcctcaccatacttatagtaacaatactaagactataacaatttaaaactgcatttcaacatctcagatagacatgttttgcttttttcaaaactttacgctacaataaatgagatgagaagaagaattaagcctgtctttgttctagctttctttagtttgttcgccttgattatcatcttagggaatattcaagctgaaaatgcccgacaaaaagaattaagagctgcccaagcagccattcctgctacagaacaaaattcagagaaagctaaagcaaaaaattcagatggagacacctttactcttaatccgattgttgatatctcgggttggcagctgcctagcgaaattgactatgataccctatcaaaaaacatttcaggagctattgtccgcgtccaaggcgggtcaggcatcgccaaaaaaaataatgcagctcacagttccggaattgataaatcgtttaagacccatattgaagagttccaaaaacgcggcgtacctgtggccgtctatgcttacgtccgtggatccagcgtcaaaaaaatgaaagctgaagcaaagactttttacaaaaatgcatctccctataatccaactttctattggctcgatgttgaagaaaagacaatgcctaacatggacaagggagttaaagcttttcgagatgaattaaaacgtcttggtgctgaaaaagttggtatttacattgggacttattttatggaagagcacagtatttcagcaaaaggttttgacgctatttggattccaacttatggtactgactcgggttactttgaagcagtccctaaaaccaaattgaattatgatctgcatcaatacacctctcaaggtcatattgaaggcttcaagaatacacttgatcttaatcaaatcgctgtcaacaaagatacaaaatctacttatgaaaaattatttggatcaagcaaccaataaacttgacacaattgccagtttcattttataataaaaataaataagtaaatatcacaaggagtgctaaccttagctgagattgcatttgcaaaatcctatggacctgatctagttaatactagcgtgggaatgtgattcgtttcatgaatgaactaaatgaacacacatggactccttgggattgtacaaggaggtcttttttatgtctaaaaatgctgttattctggttgaaaccgctctgattgccgccttagctatggttctttcaatgatacctgactttgcaagttggtttacaccctcttttggagctattccccttgtcttattcgccttaagaagaggaagtaaatttggagttctggcaggcttcctttggggattgctgcattttcttttagcaaaagtttattatctaacgctttcacaagtatttcttgaatacatcttagctttcttctgcatgggattggcaggtataactaaacagccctttcaaacagccttgaaaaatggaaataagctgaaagcattgctctttgccatactaggcgcattcatagctatcttcaccagatatgtctgtcattatatcgcaggtttccttttttggggaagttatgcccccaaaggaatgtctcctttttggtactccttcactgttaatggcagtgctggcttgcttacctttttagttgttattcttatccttgtgtttttagttataagccagccacaactctttttaccagctgaaaagaagaacatataaactaatgcgtttgaaaaataagaaatgttggtatttcttgcttaaactagaatttataattcagttttttaagttaatcatgctattatatggttatggtcaaaaagaaaaaatgtaaaaagcaactgactagtcatcaaaggcgcccttataaaaagaaaaagcaagttaactatcatatgataatcgtttctttgcttatactacttggatttagcggtcttctttaccaacatcgttttcatatttccaactcttatgaaataacgcaaacagctacaattacaccaacatcaccagtaacactctattgccatttattcgattttaatacagataaattgaaacaaactactacagtgcaagtgacaggctatcgtttaacacatctaagaggaaaaacaatgactttggccaaggtaaaattaaggggacacacttactaccttgatgctaaacatcttcagattcaacatacaaatgcaatcaatcagtatattgccagtttaaactatcctcataccgaaataaccaaaaatatctatcatcagtttgcccaaaaatcctattttggaataagtggtaaaccaaagggcattattattcatgatactggaaatgacagttcttctatccaaagtgaagtggcctatatggaaaaaaattataaatcaactggggtatttgttcatagtttccttgataaaaataatattttacaaattgctgatgacagttatatggctcagggagctggtcccaaaggaaatccttattatttacaattcgaaatgacgcatgagcacaataaggatgatttcgctagacaaacagctaatgcagcctactatgcagcttttatgcttaaaaaatataaattgcctgtcactttagggcaaaaagatacatcaggaacagtttggacacatcaaatggtttcttcttatcttggcggaactaatcatcaagatcctgatgattattgggcacaggctgctgcagatttttttgctagctcttattctattaaaaattttgtagacttaattcaggcctattataatcaactttaaaatgatataataaagtgatttattatttattttggaggaaaacatgatttcttggttaacaagattgatcaaaggtgttatcattgctcttgggtttattttacccggtgtatcaggcggtgttttagcatctattttaggattgtatgaacgtattatttcatttttagcacatttgtcaaaagattttgttaaaaatgttctcttttttattcctgttggaattggtggtattttaggtatcgctcttttttcagcgcctttagaatatctgctggaacattatcaagttcccgttctgtgggcctttacaggaacaatcgtcggaaccttaccaagcttattttctgaatcaactcaaaaatccagacgtgacagcaaagattggatttggctgctaggaacttttatcatttctggtctcctattgttctttttaaatgatttagttgggacaattcctgctaactttgttagctttattcttgctggtgctctgattgccttaggtgtgttagttccaggacttagtccgtctaatctccttttaattatgggactctacgcccctatgctgacaggttttaagaaccttgatttagtaggagtttttcttccaattgctattggcggtgctacgaccatgctgcttttttcaaaggccatggattatgctctcaatcactaccattcacgcgtttatcacttcatcttaggacttgttatttcgagtaccctcttaatcattattccaaatcctagaaataccgaaagtatctcttatgctggcagtagctttacaacctttttaatggctgctctgctctttatagcaggtattgccctaggagcttggatgaataaacttgaggaaaaatataaatgagcaagaaaaagaaattaaagaaaaccttggttgagcaaattttagataaggctaagattaaacatgacagcttagcactcaatgccttagaaggcaaattgccagaagatatccaaaaggaggatatttttaaaacactggcactaactggcgataaaactggaccacttattgggattattcccataacagaacatctttctgaaaagaaattggccaaagtatctgcaaataaaaaagttaccatgattccccaaaaagaactccaaaaaataacaggctatgttcatggtgctaataatcctgttggtattagacaaaagcatcattttccaatttttattgattctatagctttagaaaaaggacaaatcattgtatcagcaggtgagataggacgttccattcgtatcaacagccaagttttagctgactttgttggagctcaatttgctgatttaaaggagtgataacatgcgtttattaggaaatattgtttggtttttatgtgctgggttattatcttttatcggttggtctctagcgggaattattctttgtctgactgttattctcattccttttgggcttcaatgttttaagattgcaggttttggactctttccttttggaaaatcgatttccccttctagcaatgtttccagccttattttcaatatcatctggattttagccattggttgggaattggcggtaatacacttagcatctgctttcctcctttgcattactattataggaattccctttgcattacagtctatcaagatggctggcatcagtctttttccttttggtataacgattataaaagaggtataaactaaacatgaaattgtattttgtaagacatggtaaaacggaatggaacctagaaggacgtttccaaggagctcatggagattcacctctcttaagtgcatcaattatagaactaagagcattaggacactatctcaaagatattacatttgatcacatttattctagtgacctgaaaagagctaaattaactagtcaaattatcaatcaagaaaacaaacatcctgtaaaaattgaatacaccaaggccttacgagaatggaatttaggtagtctggaaggtcaaaaaatcagccttgttacttctatctatcccaaacaaatgaaagctttccgtcataatctagcacaatttaacaattcaatgtttgatgctgaatccgtctatcgtgtaacacatcgtgtttctaattttgttaaatcactacaaaaggaaacggctcaaaatatcttaatagtcggacatggtgcaactttgaccgcctctattcaaacattattaggctgtgaacctgctcaactacgacgtgacggcggtcttgataatgctagtgtgaccattttagaaacaaaagatttcgaaagttttaaactccttaagtggaatgatacctcttataaaaaagaattgtaagacaaagcttaagtatcaaacggccaatacaagccgttttctttgtccatttatgaagcataaaatctcaatcatcaaaaaacatctgaagactaactagttttcagatgttttttattgcgaaaagttttacttcatatacttttctcttcaaaagtagctatcaagtagagataccataggtttgacagttaacagcaaaaaatttatttcccaagtttttctttagctgcatctgcaagaactgtgaaagctgctgcatcgttaaccgctaaatctgcaagcattttgcgattcacttcgacttcagccaacttcaaaccatgcattaattgtgaatatgacaatccattcatacgtgctgctgcattgatacgtgtaatccataatttacggaaatcacgctttctttgacgacggtcacgataagcataatagtatgaattcatcacttgttcttttgcagtacggaacaagatatgttttgcgccatagtatcctttagctaattttaaaacacgtttacgacgtttacgtgaaacaacgccacctttaacacgagccatttatacaatcctccgataattctttctattcttttaaattactcttattttaagcgagtaagcattgacttaatacgtttgaaatctcctgaatgcaccattgatgctttacgaagatgacgacgttgtttcttggtcttaccgtggaagcggtgagaggtatatgcacggaagcgtttcaatccacctgaacctgtacgtttaaaacgtttagctgatgcgcggtgtgttttttgttttggcattttaatatttctcctacttttattattggttaacttattttttatctggaattggtgcaagctgcatgaacatttgacggccatccatcttagccctttgctcaataatagcaatatcttgcgttgcctcagcaaaatcagctaagacttttgctccaatttccttgtgagtaatcatacgtcctttaaaacgaatagaaactttaaccttatttcccttttcaaggaacttacgcccattacgaagctttgtctcaaagtcacctttatcaataactggacttaaacggacttctttaatggtaacaacgctttgtttcttacgttgttctttttgtttcttttgatactcaaatttgaacttaccatagtccataatacgagcaataggcggtgtagcctgcggctgaattaaaaccaagtcgacattagcatcatctgcaatagcctgtgcttgggctaatggtttaattcccaattgctcaccatcaagaccaataaggcgaacttcgcggacacgaatttcattgttaatgaacaaatcttttttagcgatattcttcaccccttcattatttttttgagaaaaacaaaaacggacctgacaaatcaagcccgtatacacataatattccacaggaactttaacatgttgggccagacaactttaagtcgcaaggcgagaagttctcacttctgcttttctcacttaaaatagaataacaaaatttctaagacctgtcaataatattttgtgctttcttttcaataaagttaacgacacctgcaatatcaatgcccgttgtgtcaaaagtgatagcatcagctgcaggttttaacggagaaattttcctatgactatccttatagtcacgctcagcaatttctttttttaatgtattaaaatctgtttgaattcctttttcaagattttctctgtaacgtcgctcagctctttcttcaacagaagcaattaaaaaaatcttgagctcagcatcgggtaaaacaactgtcccaatatcacgcccatccattacgataccaccctttttggccaattgttgttgcaaatcaaccaatgttttacgcaccaagggcaaggcagcaacggttgatacattattggtcacttcattctcacgaataggatgactaacttcaacattaccaacaaaaacgagttgttcactatcatccttacgacgcccaaaactaataggataatccttcaaaagtttaacaatggcccgctcgtccgttagatctgtatcattttgcaaagctaaataggtcgctgaacgatacatggcacctgtatccaaataaacataacctaactttttagcgataattttagctactgtacttttaccgctggaagcaggaccatcaatagcaattctaatacccatcatatcaacctctttacttaatcttgatgttatctccagggttagcataccaatagccatgcgtcatatgttctggattcagctcatagagtttatcaacagaaatacccgcacgcgcagcaattgctgcagccccttcacctccttgaactgtaattgtctcgccatcactgtctgaagaggaacttgtcgtttcacttgaacttgtttctgcttctgttgtctgttcatcagtttgactatttgcctcatttttggcttttttgaccgttttggaagaactatagaaacccgaagtggctgctttttcattgcttccaccatttgaagtataaagtacaaaaaataaaataccaataataatcaagaaaaagaggctcaataggattgttaaaataggtgtactgataatactagcatcctttgaatttcttgtcatttcttcattatcagtagttgcatcagttactttttcttcccatggtttatttgacatgatttcccccttgttaaaaattaataatagtactacaatgttactatgaaagtagcaattatcccagaaaaatgtattgcctgtgggctttgtcaaacctattcaggcgtttttgattataatgatgatggtattgtcatttttacagacagcaaggaaaagattaaaacagttgctgatgatccaaatatccttatggctgttaaaaattgtccaacaaaagctcttacattaccgtaagggctttttttcttttttataagcttcaaaataatcaagattgataaaattatcaatgagctccacttctcccttgaaatctggatgaagtgccaaagcatctaaaaaatattttttaggccacttacgcatataaaagagacactttttcttaccttttacaatcagagtcacagttgactttgttacctctactttttttatatctgcaatagcaatttttgaaggcttgaaaacatttaaagaaacaactcgtaaaatgccattattttcaatcacaaagtagcgatgaaaaccaacaccaactaaaacaacaaatgtaatgaataaaataaagaaatactgcggaatagaagtttgttcatacaaaagtgacaaggcaataaaaattggcataatagtgatagaccagtaaataatcagccatgacagttcaggctgccaatgatatctaactttcccaaatatcttaatcacttcgtttcctccatgtcacattattttatcacagttatgtcatttttaccaaaatttattgtttgaaacagacaattcctatgataacatcaactgccctttgcattgtttctaaactgacaaattcaaagcgaccatgcatattttcaccaccagcaaaaagattgggggtcggcagacccataaaggaaattttagaaccatctgttccgccgcgaattggttcaataataggttcaatcgctaggttttccataacttttttagctagtttcacgcaggtcatatctttttcaataatttttcgcatattataatactgatcataaatttgcaattgcacgcgctctgctcctaaatgggcattcatcttgtcagcaattttctgcataaaatctttacggcttacaaaagcttcatcatcaaaatcacgaataatataactggcatgtgccgcatcaacagtccctttaagactcaaaagatggtaaaacccttgatatccttcagtcttttcaggccggtcctcctgtggcaattgcccatgaaaatccattgccagttgcaatgcattaaccatctgattcttagctgtacccggatgaacattgcgtcccataaaatcaatttctgctgctgcagcactgaaagtctcatattgcagttctcctaaaggaccgccatcaacggtataagcaaaatcaacatcaaaatcctcaacatcaaactgatcagcacccctaccaatttcttcatcaggtccaaatccaactcgaatttcgccatgttcaatttcaggatgtttgactagataatcaatagctgtcataatctcagcaatgccagacttatcatcactaccaagaagagtagttccgtctgtggtaatcagagtctgacctaagtagttatttaaattaggaaactcctttggatccaagacaaaatcagtctgtcctaattgaataatttcaccattataattatcaataatctgaggattgacaccttcagcattaaaatcggctgtatccatgtgtgcaataaaaccgattttataaggaaaattgccatttgcaggtaaagttcctaccaaataaccattttccaaataatgaacattttgaagcccaatacttttcatttcgggttttaaaatggttaaagcaaaatcaacctgactttgtgttgttggtgttgtttcactactttcatcacttcttgtattaaccctagtataggttaaaaagcgattcaataaattatcataagtcatttattacctcttaccctgtctccttaattataacagaaaaaaccacgtttatctgtggtttttttaatattatttggaattttttactttgattaatgagttgaaacatgataataaactcggtttgtaaatttgccactatttaaactctcagaagaaacaatacgatcttttgttttatcggattcatcgctttgaccattagaaaaatattgattagataaggttttattggctggcacaatataaagagttagattcttttttgttccagtctcaacatttaacaaaagatttccgtcttgatcaatgttcaacagactgactgtcattccaggggttgtcagacctcgctgatcaaatgtcaacgtttgtccttcttcatttttccaagttcctgccatactactgtaatcagcctttaaaacagcgcctgtatcaatgggagcaagggtttcctcgttattagaatgagaagaagactgactgctttctgaatgagcttctgtcgtttgcttagcatcagttgatttttcacttgactgttttgtttgtaaagtagtcttttgagaagtcgagctgctttctgatttggtttttttctgcattgagcatcctatcaaaagaaagactgtcaaaaataaaccaataagaaagtaaagatttcgttttcttttcataaatcaaacgcctcgtttctttactgttgagtaaatcgaccagtataatcaatattttcatccaaagcatgagacaatttagacgatacactagtatactgccaagctgctgcattagcataataattaagggatttagcttcttcttgagtcatataagtataccctttggcataatgagcaacccaaaaattattgatgccaaaccttgcagtgtctacttgcccaccgcgtatatccaaccaactagccatagtataatgaatcaggttgctataaccttgacgcctcatctcatcttgccaagcttgaacattattattaatattgttcaccatagaggattcttccatatcattgaccatgacagttgatgcctccaaaccaaaggatctggctgcattagcaaaataacgggcttcttcttgtgccccggccgcagaagtatagtgagcataatggtaagcagaaaccttaataccggcagctctggcattggcaatttgagaacttgcatatggattgatgtagcttgtaccttctgttaacttaacaaccactccttgaataccttgttgtttcaagctattgaattcggcaacagaaatgattccattgtggctactaatatcaataaagtaagatggtagagcaacagcaggtttatcagcattcaagctatagtttccaatattggttccgctactagtgccatcagtataatcaacatagacatgaatgttataatttcctttaatatattgatgatttttttcattaatggtgactgttaccttaccatcaataatagttgatgaaacataccaatgaaggttagattgatcagcttctgaccaagcagctatccgaacttctttgatggctttaccacccgcttcttgtttaacaatcatatctatcgttcctgcactggcattataatttgaagcagcgataacagcattccttgtctctgcaacattaaagccatcagttgctgctaaaccaaccgctttattgtcaaatttactttgtccatagacatgaacattataatggcctgtttccccattatgatcagctaactgaatttgcgctgcgtaggttccatcaccttgttttgtcgcgggaatccattgaatatcatcttgattgtttttatctgtccagacaggaataactactgaactaatgtaagctggcaggttagaaacagtcactttataaagagcatcggattctttagcaatatcaaccttggcactaggctgattaatagttatcgttttgccattaagcccaaccattttcccatctttaataatataagtatggatatgataaagcccataaccactgtggttactgtaagctgcagttgccgttccatcactatttgcactataccacttgagatcatcttgaccattttgatccgaccaaacggcaaatcgtactttggtataatctgtaaccgtgtttgaatctaatttgagagcaataccatcactagttaaatcggctgaaacagtatttttctcaagcggtttattgatctgataagcccctaaaatagtaccagaatgtgtcccatcagtgtagtctgtataaacatggacattatatttatctgaagtatttgaatgattagcgatattaatcgtcacagttgccttattatcgacaatttttggtgaataccacttaaggtcatcttgacctttatcttcagaccaaacagcaatattaacagcagatacagtctttgtatcagatgaaccctcaacaacaacatcaaaggtcgttttattttggtcataattagcaacagatatccttgcattgggtctagtatcattgcggtcaaaaccagaactaacagctaagccaatttgagactgggttactgtgctgtagccgtaaatatgagcttcataatgtcccaaatcattcttgtgatttttagtatcaatcaaaaccttataactgccatcatcagcctttcgggcattataccatttaatatcatcttgaccgttttgatctgaccagacaggtaccatgatgccgctaatagtattaggaacattagaaacggttaactcaaaattcgttgctgattttctttgaatattagtttgcacctgaggttgagcaattgtaagagttgttgcgttaagtcctatcatcttgccattttgattagcataagtatgaacataataggtcccatactcacgatgattcttaaattcggcataggctgctcccatattatttgccgtataccattgaagatcatcttgatcatttcgagctgaccagacagcaaattgaatcttagtatttcgagcgatctgaccgttatactgtagcttaatccctttttcttccactacagcacttgtgacttcttgtgcctgtacttgcttgtcttgtgtaagagaagaacgagcttgtacgctgcttgctggggtcattttattggaaagacgtttagcatcagtttgttgatccaaaggagcagatgatgttaattgtaattgatctgcggtagaaatggtttctgcttttacagagggaacagtcgaaatctgatcaggagtctgcacagaactagcagtacttgcctgagacggaactgtttcagtctcatttgctttggcaggtgagccatttgtggccgccttcatagaggaaacagttgtctcagacgtacttgttatcggatcagactgttcctgtgtttgctgcaattgaatagtactgtcttgtccattatttctgacctcctgacttatctgtgctattgtcgctggtaattcagatactgatgtcgcatcagaagaaataacttctgatgcacttaaggattgattttgctcatctgcagatattttattagcagccataaatagggtcaatgctaatggaatcatcaaataagttttgcttttcattctttttcctaatttccttaaaatattatttgttcattatatcatgtttatcaggacgtctcaagattaagcattgtgctatatattccaataattgagtcataaaataatgcacactctaataaggctgtttttttatcattacaagagtatatgattccctttctcactgcatacagaaatcttatctcacaaaaggagcttcctttccatttcattattcaatagaaatcaagatttttactcttaagccagcctttcttgtaatttttctacaaaaagatagacagcaggacaaataagagtattttggatagtcagatggttaatttgataaatttttttacgatctgtatgaggaaattcacggcaggccttgggacgaatatcatagatagaacagagattatcctctcctaaaaaggggcagggcatagacttaaaaaccttgccattgtcttcgtccacacgcaaatacatatcttcaaagactgggagtctcatacgaaaatgtttagcaatacgactaatatcggcttccgtaaaaagtggtcccagcattttacagcagttagcacacttagtacagtcaatttccctaaaaacttctgtatgaacttcttgaacaatcttatccagatttttaggtgcttttttcttaagagtcgctagaaatttgcggtgttctttctgcttctgcagtgctaattgatggtatttcccaatatcaatttcttgtgtcattattatactttcttaactaatatctttttaaattataacatatctaaagactagtcagaaattttttaatatatatccattgacccaaaaacctaattttcctcccatacgtctttggctaagttgaaaactgcccaagcttttggccagccgacatagaaagcggcatgtgtaatgatagcagcaatttctttcttgcttacaccattgtttttggcattttgcaaatgataaactaaagaagaatctgtaacacctgatgacatgagagctactacagtaataatgcagcgcattttgagatcaatatcctgattattccagttttcaccaaaaagcacatcatcattgaaatgagcaaattctggagcgaaatcaccaagtctatcacgcccagcggtttgtttaatagtcataagttttaccttctttttaattttaatagtatgattcacttttaatcatgaattttaacattgagaacacttctgacaaaattgggatcgaaatgttttgttcgcgtatctccataacccatatccagcgaagctattttggtcatctcatcgtctgttaggctgaaatcccaaatagcgaaattctcttcaatacgctctttgtgggttgattttggaataacaacgacaccgcgttgaacattccagcgcaacatgatctgtccaacagttttttgatgagcgctagcaacttcctgcaaaatagcattattaaaagcgtcataacgtccaccgcctaaaggcgcccatgcttctggcacaacaccataataacgagcagtctccaaagcttcttcttgagtaaagaatggatgcaattcaatttgattgactgctggaataaccgacatcgtttcacagaaattcgtcaaaatattaggataaaaattgctgacgccgatagctctgagcttgcctgcctgataggcttcttccagagcacgataagcaccaaaataatcgcgcatggcttgatgcaagagatacaagtcaagataatccaaaccaagtttttctaaagaacgctcaatacccttcttagcagcctcataattcatatcctgtacccaaagttttgaggtgataaaaagctcatttcgcgtcaccaaaccttgctcaatggcttcatggattgcttctcccaatgctttttcattaccatagacagccgctgtatcaaagagacggtaacctgttttgatagcattaagcccagattccttacaaatttctggatcagtcacctgaaaaacaccgaatccttccatgggcatttttacacctgtatttaaggttatatattccataacattctcctatttataatttgccagaaacttaacagtttcaggatcgtaatggttgataaagagactttcaccttggtccaatttcaaaatgtctgccatatcatcgtcggacaaattgaagtcaaagacatcaaaattttgtaccatacgctcttgatggaccgtctttggaatgacaacaatgccacgctggataagatagcgcagaccaacctgagcagcagatttcccatacttttcaccaatagctgttaaagttggattagtaaagaaattatttttaccttctgcaaaaggtccccaagattccagctgaacaccgtattcctcactaacctttttagcttcaatctgttgattaaaaacatgggtttcgacttggttgaccataggtacaatctcattaaagcttgccaaatctactaaacgatctgggtaaaaattactgacaccgatggctttgattttgccggatttatagtatgcttccagagcacgccaagtaccatagtaatcgccaaaaggttgatgaataagcaccaagtcgacatagtctgtctgcaatttgcgcagcgattcatctagagaagctttagctttttcatagcccgcattagaaatccagaccttggttgtaatgaagaattcttcccgagccagacctgatttgcgaactgcatttccaacggcctcctcattgccatagacttgtgctgtatcaaggagacgatagcccaccttaatagcttcagtcactacacgctcacattcttccagatcaggcacttgaaaaacaccaaaaccttaagataggcattttcacaccattgataagactacagtttccattagttttcctcactttctgtgaacaatttctgttcatgcttttgaataatattttcataattttcaattttgtaattgagacgttcacgcgcttgattaagtttgtaaatacgatcatccatttcatcacgctgttccgttagtaaacgtagccgttctctttctgtaccttctccttcttctaagagagaaatgtattcaatcaaggcttcaacactcatgccagccttacgaaaacagcggacaaattccaaaataccaatctcacgctctgtgaaatcacgaacgccggaatttgttcttgtaattcgcggcaaaagaccaatacgctcataataacgaatagtatccgctgatacgtcagttatttcacttacttttttaatattcataacatcacttctttctttggactttataaattcattataaaccttaaagtctacttcaagtcaagttaaaaccaatgaaaaatccaacttatactcttaaaaagaggaaaataaagattgaaaattatataataaccccttagcaacttgaagacaagtctgctttttctatacatatatgttttgacactctgcaaataccaatttaaatggcattgatttgcaagcgaagcgagccctaatcgagactttatctacactctgaatcccttagtttaatttttaaagtgctttgatatacttgacgaatgatcgaaaagagagtggacagaaatcagtaactcgtaatgaaatgacgattcgattttgtcagttcaccttccgcaaagtggattagatattgacagaaactgacctcatgagcttagataagctccaactgtttcccaaacaattggagctatcatttacaaagcaaaggatactttacagtggtctgttaaaagtttgagtttaaaagccaaggtgcgaaaattccaatcaaccactgtgttaaattaaaacccctgtacaataaaaaggctggaacacttttgttccagcctcacatactgaactcatccaactactacaactgacagatgagctcaagttttttagattattatttgatatcaaatacgacggatttaacagttgtcatagcttcaatagaatattttaccccttgaatacctgcacctgattttttagctcctaagaatgggaagttgtccgtgccgcgctgtgtcttattattgatatgaactgtaccaacttcaagctgctcagcaataccaaaagcgcgtgggaaatcatttgtaaagatagaagcctgaagtccatattccgatttgttagaaatttcaatggcttcttctacagatgtcacacgaatgatcggaagaacaggaccaaatggttcttcccaagcaagacgcatatctgtcgttaccttatcaaagaggattggacagataagattaccttcacgtttgatttcagtaagggcagtggctcctttatcattggcatcattaataagaccttctacataatcagctgattttgtatcaatcaacggtgtaatatctgcatcgtcttctggattaccaattgttaatgcaagaacttttttacggattttttcgaccagttcatcagcaacactttccatcacaagaacacgtttaactgctgtacagcgttgacctgaataaccaaaagcacctgcaataatatttttagcagtcaattcaaggtctgcatcttcaagaacgatggctgaatcttttccaccgagttcaagcataatcggacgcataccagccattttgccaatacgttccccaattcctgttgaaccagtaaaattgataaagttaacggcttgatgttctacaatatagtctccaatttcagaaccacgacctgtaatggtattaaagacacctgcaggaagtccagcttcagcaaatgcttcagcaagtaagagccctgagattgatccttgcgtcggtggtttaaaagcaataacatttcccgcaataagagccggtgcaattttcgaacctgccaaattaacagggtagttaaatggtgaaatagctaatacaagacctactggttcacgacgaacaacggcaatttttttcttgctggctgcttcaaaactgccgccttcaaggacttcaccttccatacgaaggccttcttcagctgcataattaatgatttctgcagtacgaacaacttcgctgactgctgatttataacctttagcaacctctttggaaagaacagcacctattttttctttatcacgcatcaaaatatctgctaccttatgaaggtaggcagcacgttctatgtatgaaagtgatcgccaagctggttgagctttcttggctgaagcataaacataatctacttcttcagtactcattgctggaaccgaacccaattcagctccactggccggttcgtagattttaatttcattttctgaaagcttccactcgccattgacataatttttatattgttttgtcaaagtaatgtctccttttttactgtaataattttattctatcatttttttcatttttttcaatcttttgatacgataaaattcagaaaattaaaaaatttcattttattgtcaaacagcaaataatagatttgtcttcaaaaaagcaaacaaaaaagaagaaagtaaagtggcttcctatgattgctcaacaatcacagacctcaacctactctcttcttatttaaacgaattagtcaaaattaatatattctttttctaactcaagaacttcttccatcgttgcacattctgtcagagcacgctgagcaagttcttgcattttagcagtatctaatttcttcataagactgcgtgtacggagaaccgatgttgcagacatagagaactcatcaagtccaataccaacaagaaggggaactgctgtctgatcgccagccatctcaccgcacataccagcccatttaccttcagcatgagcagccttaaccacatgatcaaccaagcgaagaatggatggattataaggttggtagaggtatgatacttgttcattcatacggtcagcagccatggtgtattgaataaggtcatttgtaccgattgagaagaaatcaacttccttagcaaattggtcagccagcattgcagctgcaggaatttcaatcatgataccaacttggatatcatctgaaacagcaacgccttcagctttaagattagccttttcttcttccagaatacctttagctttacggaactcattgagcaaagctaccattgggaacatgatacgcaactgaccatgaacagaagcacgcaaaagggcacgcaactgtgtgcggaacatctgattacctgtttctgagattgaaatacgaagcgcacgaaaaccaaggaatgggttcatttcttttggaagatcaaagtaaggaagttccttatcaccaccaatatccatcgtgcggacaacaaccggcttgccattcataccttcaagaacagctttataagcttcatattgttcatcttcagttggaaaatcttgcgaatccatgtatagaaattctgtacgatagaggccaactgcttcagcaccattgttattgacaccctcaacgtctttaggtgtaccaatattggctgccaattcaaagtgcttaccatcagcagtaaccgtttcagcatccttaaggagagcccattctgctttttgcttagcataagtctcaccagctgctttgaactctgcaatttgatcttcagttggattaataatcacttgaccagtaattccattgacggcaacaatatcaccatttttcacacgctctgtaatatcatttgtaccaagtacagcagcgatttcaagtgtacgtgccataatagcagaatgacttgtgcgtccaccaatattcgtcacaaaagctttaacatagttagcatccaattgagccgtatcagatggcgttaagtcatgagcaattacaatagattcttcactaatcgttgctgggtttggcaattcaacacccagaaggtgtgccaaaacacgcttggcaacgtcacgaatatctgcagcgcgctcttgcatatagggattgtcttccatattttcaaacaaagtaacaaacatatctgtcacttctttgagagcactttctgcattaacttcttttgtacgaattgtctctttaatctgcccaatcatctctgggtcagcaagaaccatcaaatgagcatcaaatacagctgcggcttcttcaccaagggtatctactgctttttggcggataagagaaagctcgttttgagaagcttctagagctgcatccaaacgagcctcttctgcttgtgtatctgtgactgaaacagtctcaaatgttaagtccggttgaacaagtagatatgccttagcaacagcaacaccatcagatgctgcaattcctttaagcatttctgtcatatctttaagccaatccttctttagtcatcgtttcattaatagctgcaattgcatcatctgcatctgcaccttcagcagtgattgtaacatcagcaccttgaccaacaccaaggctcataacacccataattgacttaaggtttactgcttttcctttgtaatcaagtgtaatatctgaggcaaacttacttgctgtttgaacaagcaaagtagctgggcgtgcatgaattcctgtttctgcaacaatgtgaaaatcttttgaagccatagtatggttctccttttttagtatgtgtttttttgaattatcaaatgataacccttacaattagagattatagcacaatgcttttttattttcaatctttaaaccactttttctgaaaataatccatgaaaaaacagtaaagattattattgttaaatcagaaaactacctttttttgaaatctttattttttacagaagctagctgcttatgaacagctgtcacaaaaggggcatccttgagttttaatttgtggtaattgcgcaacatgcggcgttgatggaagcgaaaaggctgaatacctttttctcgaaacatcttttcaatctgcaaatgaaactgtctgagactcagataaaaaaagtctgtttcttcttccaaatttccccagatttctcttaaatatgcctgaatatccttaccttccgcactcattttccgctctaaagataaagctgcccgctgaaagctagctaagtcactcactgtccaaataaaatcagctgtcataaacaaggctatacccaaagcccaccaagcatttacctttgccaacaactgcataactgagggctggatgaatttcacaagaaaaacaacaccaattccccaaaacaaagaaatgcgaggagcaattcggcctttaatatttcctgattcttggctataatcccataatttcatatgaaagaccttctccaagaagcaagccgccatatattcaaaaactgtcgcaataataagaccgccaaaaaataagattggtaaattttcctgaaagggtttcgtcaaaaacaaaacagttgttaccgcaaaaccataaacaggacagtaaggccctgctaaaaatccacgatagacaaactgtttatcttttaatgaacagtagactgtttcccaaagccatccgataaaagaatagataaaaaagagaaaaacaagattcgatatagaataccacatgaatttaccttcactattaagatgtcaaaaatttttcttattttttaatagtgtccttctataaaataattttaccataacagccctgagaatgtagaaaaagtcttcttttgagactttccttaggtgatacggacggtagcgatgaggaaactttcgtttccttatgtcccaacctgaaatagctttatgactatttcagccttcggaattccatacctaaaaccaagatacaaagggcgttaagcggataaaggcaaaatagggagtacgacgcggaatcattaagattctaggaggactcatctttttgccacaatccgcagcccgtggtcagttaagatttgagcctaaggtctcaaatcttccgagtgcctgaaacattaaagtttcaggcactcttatcacgacggaaaatctcgtttagagctcgcttcactcgcaaataagaaaaattaaaatttgcagagctcaaaatttttttacgttggaaaataggttcgtcttcagtctgaatagcccttttcttacatatttcaaaataacaaagcgactgagataaaagtattccggactttttattgtgcagtggtttccatctaacacaataatttaatcgaaattgccatttcattacgaattaccaatttttgtctattctctaaaaaatctataaataagtcaatagaacttcagaaaactgacgggttgtcaatgcttcaacccctagttccttggcaaaatcaatggtaacttgaccatttgcaatagctttttcaacagctttcatgattaaatctgagacttttgaccaaccaatatagtcaaaaagcatgcagcctgataataaaacagaagatgggttgaccaagtcttgacctgcaatatctggagccgttccatgggttgcttcaaaaatagcatgtcccgtttgatagttaatattggctccgggcgaaataccaataccgccaacttgtgctgctaaggcatcgctggcatagtccccattgagattcgttaaggcaactacatcaaaacgctcaggcttgagcagaatttgttgcaagaaattgtcagcaataatatcatcaactaccaattgaccactggcaagttcggcagcatactcacgttttgctaattcatagccccattttctaaagccaccttcagtgaatttttgaatatttcctttatgaaccaaagttaccttggtcagattgttggccagagcatattcgatagctgcacgaatcaaacgttggctgccttcaattgaaataggtttaatccctatactgctgctttttggaaaacgaattttcttaacctgcatatcatcttgtaaaaagttgatgaccttttgaacttctgctgtacccgcattccattcgatacctgcgtaaatatcttcagtattttctcgaaaaatggtaatagccgttttttcaggatgcttaagtggactagggacacctttgaaataacgcactggacgcacgcaagcaaagagatccaattcttgacgaagggcaacatttaaggaacgaatgccacctccaacaggagtttccaatggacctttaatagcaagtaaatgcgtcttgataatttctaaagtctcattaggcagccagttgcctgtttcattataagcttttttaccagctaagacctcccgccaaataacctgcttgtgacctccataaactttagcaatggctttatcaaaaacgatttgcgcattcttccaaatatcctgaccaacaccatctccttcaatgtaaggaatgatgggcttatcaggcacctgtaattttccttcttcaaaacttactttttctgccatcttatctcctttcaataggaatatagcgtaacttcctcataccagtatagtgagagcgtggacggattaatttattatttttttgttgctcttgaatatgggcaatccaacccgaaacacggctcatggcaaagattaaggtaaaaatagaactatcaatacctaaaacatggtaaacagtagccgaataaaaatcaacattaggaattagatttttcttttgcttcatacacatttcaacttttttggataattgataccaaatgtcatgctctgttcccttggtcaattctctagccatttcgcgcaaatatttttcacgtggatcttgtgtctgataaacgcgatgcccaaagcccatgattttttctttagagttgagtttttcttgcaagtaactgtcaacatcaccgtattcacgaatctctcttagcatatcaaatacacgctcattggcaccaccgtgcaagggaccttttaaggttccaatagctgttgttacacaagagtaaatatctgatagagttgaggcacaaaccctagccgcaaaggtagaggcattgagttcatgttcagcatgtagaacaagcgcacgattcatagctaaaatctctaattcacttggaaggcggccatttaacatatataggaaattagcagcgaagccaagatcctttctaggagcgataggagacagcccctgacgcaatcttgcaaaggttgcaataatggtcggtatcttggccatcaactgaatgctttggtcataagtagcttctacacttctttcctcagcttttaaattataaacgcctaatagacttaccgttgaacgcaaaacactcatggggtgtaggtgctggcgcgattgaatgagaatacattgttcaatggcatcacttatcgcataatttttgcgtaatttctcttcaaattgcttcagttcaattgctgttggtaaatgaagattccaaaggaggtaaatgacctcttcaaaccgagccttattgtccattaaatcagcaatatcataacctgcatacgagagtttattatccttgatggcactaattcttgtatcacaggcaatcatgtcctttaagccatttgtttctgccatagacttaacctccattcaattttttacgcacaaccattggaagaataccgccattttgataatagcgaatatcagcatccgcatcaaaacgtaagagcacttgaaattctttagtcccttccttagaagtagcttttaccttaacaatatcatgaacttgcggctgttcaggaagttccacagtgtatgtttcgtatcctgttaattggagactttcagccgtttgaccatcaaggaattgtagaggtaaaattcccatcatgactaaattagaacgatgaatccgctcaaagctttctgctaagacgaccttgacacctaaaagattggcacccttagcagcccaatcacggctagagcccataccatagtcttttcctgcaataacaatagtagaaacaccgtttttcttataattcatggcagcctcataaatcggtaagatttctccttcatattttgtgtaaccaccgattttgccatcagctaattcatttttgatacgaatatttgcaaaagttcctcgcatcatgacctcgtgattaccacgacggctaccgtaagaattgaactcagcataagtcaccccattttcttctaaatagcaagctgcagggctatttctcgcaatattacctgctggggaaatatgatctgtggttacagaatctccaaatttggctaaaacctttaatgcacttaaatctattttgttctcagtatttgtcagattctcaaaataaggaggattttgaatataggtagagacttgattccattggtaatttttggaattctctgtttcgatctgattccatttttgactatcagaaaaaacatgaccatattcttcttcaaataattcagccgttacaaactgttcaatataagacagtacttcttcttttgcaggcataatatcctcaagataaacagcctggccatttttatcatagcctaaaggctcagaagttaagtcaatattggtagtacctgccaaagcataagcaacaactaaaggcgggctagctaggaaattagctttgacgagtggattgacccgtccttcaaaattccgatttcctgacagaactgcactaactaataaatccttctcttgaacagccttggcaacttctggaaccaaatcacctgaattaccgatacaagttgtacagccgtagccaaccaaattgaatccaagcttatccagatagggttgtagaccactctttcgcaaataagcagtaaccactttagaacctggagctaaggatgttttcaccgttttggcaaccgataaaccacgctcaactgcttttttagccaaaagtccagctgataaaagaacatagggattagaagtattggtacaagaagtgatggctgcaatggcaacatgacctgttttgacttccaattcctgaccatcatcaaaatgaacagtcgcctttttagccaactcatcagctcctagaccaaaaccgcggacaccagactgacgtaccaaactcgcctgaaattcttctttggcttgacccaattcaatcaaatcttgaggccgtttagggcctgagatagaaggtttaatggctgataaatcaatttcaactattttagtgtaggaaggcagatttgtcatatcatggtaaagatgatttcgcttggcatattcttttgttagtgcaatgtgttctgctgagcgattggtcaatttcatataatttaaggtttcatcatcaatcggaaaataaccacaggttgcaccatattcaggtgccatattggcaaccgttgcgcgatctgccaaagaaagtccagctaaaccggggccgaagaactcaacaaacttgccaacaacattttctaagcgcagcttttgggtcaccttaagtgctaaatctgtagctgtcgctactttaggaagctctccataaagacgaacaccgatgacttctgggatgggaaaataagaagcttctcctaacatagctgcttcggcttcaatgccaccgacaccccagcctaaaacaccgataccattgatcatggttgtatgactgtctgtgccaaacatcgaatctggatataagaaaccatccttattaataatcacatcactcaaaaattcaagattgacctgatgaataatacctgttgctggaggaacggcccgataattttcaaaagttttttcagcccatttaagaaattcataacgctcattatttcgttcaaattctaaatcaatattagcgtcaaatgcgtcttgatttccaaaaaaatcaacttgaacactatgatcaataactaaatccactggaatttcaggattgattaaatctgggctgccgccattttcaacgacagcatcccgcatagaagctaagtcaacaacaacaggaacacccgtaaaatcctgcaaaatgactcgactaggtttaaaaggtacttctccttgaggagcttttgaattataatgaaaaagagtttctatgttattttttgtgacacaaatatcgtcgtgctttctcaataaactttcaagcaaaattttaattgtataagggagactatcaagctctataccatagtctttagaagcttttaccaaatcaatatagtgatatttttgccgatttaacgtaaaagttgatgtataattaatcataatcagtctccttttttcttatattaattaaaattatacaattatctgaatgattaaacaaggaaaagcttgcattttatgttatgttttataacataaaaatagataactgagactaacactatatcttgtgggaattaaaaaacttcggtactatattttgtgtttttttgagtaacttcccttgctttttttcttatttttagatatgctaataaagcaacttataaaagttaaaaaatttaggaggaaaaaatggctaaaattactgttttttcaaaaaataactgcatgcaatgcaaaatgactaagaagttcctagaacaacataacgctgatttcgaagaaatcaatattgatgaacagccggaaaaaatcgaatatgtcaaaagtctaggatttactgccgctcctgttattgaagcaggcgatcttgtcttctcagggtttcagcctgctaaattgaaaaccattatttaagcaattcgataacaaaatcagcaacatgttcattgctagaggcatttctataccacaactaatgaactggggaaatacctcaatttgctttggcaattaaaatttcttacccttgcgttttatcactatattttaaagaaagaggttgggaaatttccaacccccttcttatgtaaaagaataataaggaattagatagatgagtttaaaaaatcttggcgatatctcttactttcgcctaaacaatgaaattaatcgtcctattaatggacaaattccacttcataaggataaggaagctttagaagctttctttaaagaaaatgtcaagccaaataccaagacatttgacagcattactgataaaattcagtttttagtggctaatgactatatcgaagctgaatttattgctaaatataagtcagaatttattgaacagctgtctcaggatcttcatgcttatgattttcagtttaaatcatttatggcggcttataaatttcatcaacaatatgctctaaaaaccaatgatggagaagaatacttagaaagcattgaagatcgcgtacttttcaatgccctttattttgctgatggcaatgagaatttagctcatgacttagccatggaaatgattgcccagcgttatcagcctgccacaccttcttttcttaatgccgggcgcagccgccgaggtgaattggtttcttgcttccttattcaagtgactgatgatatgaattcaatcggacgttcgatcaactccgctttgcaattgtcccgtattgggggaggtgttgggatttccttaagcaacctgcgtgaagctggtgctcctatcaaaggatttgctggagctgcatctggtgttgttcctgttatgaaactgtttgaagatagtttttcttattctaaccaacttggacagcgtcaaggtgctggtgttgtttatttagatgtcttccatccagatatcatggcctttctttcaaccaagaaggaaaatgctgacgaaaaggttcgtgttaagacactttctttgggtgttaccattcctgataagttttatgaattggctcgcaggaacgaagacatgtacctctttagtccctattctattgaacgtgaatatggtgttccttataactatcttgatattactgaaaagtatgatgaattggtcgccaaccctaagattatcaaaacaaagattaaggctcgcgatttggaaactgaaatttctaaattacagcaggaatctggttatccttacgttgtcaatattgatacagctaaccgtgccaatccaattgatggcaaaattattatgtccaacttgtgttctgaaattcttcaggttcaaaagcctagccttattaacgatgcgcaagaatttgttaaaatgggaaccgatatttcatgtaatcttggttccacaaatgttgtcaatatgatgacttcacctgattttggtcgttctatcaaagccatgacacgtgctctgactttcgttacagattcatcacatattgatgctgtcccttctatcaaaaacggcaataagcaggcacatacttttggacttggtgctatgggactgcattcttatttggcacaaaatcatattgaatatggcagtcctgaatccatcgagtttactgatatttactttatgctcatgaattactggactctagtcgaatccaataatatcgcctgcgaacgccaagaaacgtttgtcagttttgaaaaatcaaaatacgctgatggttcttattttgataaatatgtaactggtcagtttataccaaaatctgacaaagttaaagaacttttcaaaaatcatttcattccacaagctgaagattgggaagcccttcgtcaagcagttatgaaagatggcctttatcatcaaaatcgccttgccgttgccccaaatggttctatttcttacattaatgatgtttctgcatccattcaccctattacccgtcgaattgaagagcgtcaagaaaagaaaatcgggaaaatctattatccagcagctggactgttaacagataccattccttactatacttctgcttacgacatggatatgcgtaaagtgattgacgtctatgccgcagctacgcaacacgttgaccaaggcatgtcactgacactctttatgcgcagtgatattccacaaggcatttatgaatggaaaacagagagcaaacaaaccacacgtgacttgtctattctgcgcaattacgccttcaacaagggtatcaaatccatctactatattcgcaccttcactgatgatggtgatgaagttggtgctaatgaatgtgaaagctgtgtgatttaactgaacagtaaggattggagctaaagctcctaatccttacacggcaatcgctaatggcgaattgcctagttcacttactaacttcgaaaatgaagtatcatcgacttcattttctacgtgtcgtaaatatttctttttgatacttttcttaagtggtgggatcatcagcgatcgactacgtcgttccatgactaagttcaaagcctttaggctttgaacttcctcgagcggttacaccgctcttaacaccacaacgaaaagtatcgaatttgggatcacgctattcgccatttctactaatgcaaagcatgtaaatatttggtaaacaagcgccaaaaatagaatttctaaaaaaatgatgaagtctcccaaataaatacttgctgctgtgataagaagataattaatctaaaagtcaattatctgggaaattctcgagcctgaggtctcgagaataagcaacaaaacacgtagtcggtcgcttgcatttacaacccttaggcaactatcaagaataaacaaaaaatagctcatacttaatcaggagaaacacatgacaacttactatgaagcaataaattggaacgaaattgaagatgtcattgacaagtctacttgggaaaaattaaccgagcaattttggttggatacccgtattcctctgtcaaatgacttggatgactggcgtaagttatctgccgcagaaaaagacctcgttggtaaagtttttggcggtctaacattattagacaccatgcaatcccaatcaggtgtagaagctctccgcggcgatgttcgcacaccacacgaagaagctgtgttgaataatatccaatttatggaatctgtccacgccaaatcttactcatcaatcttttcaacgcttaacactaagtctgagattgaagagatttttgaatggaccaataataatgaatacttgcaaaaaaaggctaagattattaatgagatctatgaaaatggaaatgctctccaaaagaaagttgcttctacttttcttgaaacttttcttttctactcaggtttctttacgccactctactacctcggtaacaataaactagccaatgtggctgaaatcattaagctcattattcgtgatgagtctgttcatggtacctatattggctacaaattccagcttggctttaatgaattgtctgaagaagaacaaagcgaatttcgtgattggatgtatgatttactctaccaactctatgagaatgaggaactttatacccaaacactctatgatccagtcggctggactgaggaagtcatgaccttcctgcgttataatgccaataaagcactcatgaatttgggacaggatcctctttttccagataccgccaatgatgtcaatccaattgtcatgaatggtatctcaacgggaacatcaaaccacgatttcttctcacaagtcggtaatggttacctgcttggttctgttgaagccatgcatgatgacgattatctcatgggaaaataagccaatcattattcaaataagttaaaaagaagaagcacttatcaaatgtctcgctttagagctaggtatattgataagtgcttcttcttttaaattgtattggtcactattatgttagcaattatttttatcaattatgctgttcaaacacttcctgtaaaatcattatgccttgatcgatctcatccttggtcagagtcagcggcggtaagagcctgataacattggttcctgctgtcaggacgatcaaacctcggtcgcgagtagccttgaccatttgaccaaggtcagccgtcgtttcaatacctatcatataacccagtccgcgcacttgagtgaccgtatcagcaacctgcaaggcagacgtgagctgctcttgtaaataatgagcattttcccaagcctgctctaaaaaacctgccttagtcataatatcaagaacggccgaactggctgccatggctaatttattgccgccaaaggttgaaccgtgcgaaccgggaccaaaggcactgccaaactgcttttttgccaacatggcaccaacagggactccattggctagaccttttgccaatgtaaaaatatccggttcaatgccatagtgctggaaggcatagagcttgccagtccgtcccatacctgtctgtacctcatctatgataagcaacagaccattcttctgacagtaatcagctagggctgtcacgaagtcctgctcagcaggcagcacaccagactctccttgaacgagttccagcataacagcagctgtgttttctgtcaccaaagctttaacactgttcaagtcattgaaaacggcatagtgaaaatgcgggacagcatcaccaaaaccgactttgattttatcctgtcctgtcgctgacatggagccaaaggtcctgccatgaaaggaattctgaaaagtaataatctcttgcttgcccgttgctttacgggcaattttaatagccgcttcattggcctctgcaccgctattacaaaagaaagctaaataatccttaccagccatcaacttagcagcgacttcttcttgcaaactattttgataaagattgggtgtgtgccaaatttgctcagcctgtttttgcaaggcaacttgaacttgcggatgaaaacccagattagtcacgccaatgcctgttgaaaaatcaaggtattttttcccttgtgtatcaaagagatagttaccttctgctttgataaactcaagatctgctcttgtatagttttgaaataagttactcataactaaatagtgaaaacgaatagaaagtacgacatttttagaacacaatactataaaaattgaaagagcatcttttatgacgtcactttgctttaatgaatctctgtccttctattcgactccaattcctttctattaatctgctgtgataagcgttcctgtcaataaattatctccaattaaaacctgcccgacgcctgcggctactgttttaacagcgctctcaattttgggaatcataccagcagtaataacagctgtatcaatcttttcttggacttgatgacttgttatcttttccagcacagctccattttctaaaacacctttaacgttggtcatcaaaatcagtttatcagccgcaagtgctaccgctactgctgtcgctagataatccgcattgatattgagcatgtccccttctttggaatagcctaaagaagcaagaataggaatctgcctgttctcaaggaattcttcaatgacccttttattaatatgcgtcacatcgccgacatagccataggtgtctttatctagataatcagcagccactacatgcttaatgtccgattttaactgctgacagctgacacctgcctgccttaatttttcctgtaaattctttccaaccaaatcaagaagagcgtgacttaccaaaaccatgtcatctttgctagtgactcgcaagccattgatttttttgactggaacctgattttcttccattaacttattaatcgcaaagccaccgccatggacgataacaagctgtttgccagcatcctgccagttcttgatttgactgagaaaatctccactcagctgttgacttgctactccgccaattttaataacaataatatctttcatttgctttcctttgctaatggctcagctgctaggtccgatagagggcattgattttaacataatcataggacaaatcacaaccccaagccttaccaacactgtcccctgcatgcaaatccacaataatcttaatagtatctgctcgcatgacatcctgcatgtcttcctcatcaaaatcaacaggactagaagctagcatgactggaatgtctgccagataaatatcaatattatccacgggaacatcaacaccagcatagccaactgctgccaaaatacgtccccaattgggatcttcaccaaaaattgccgttttaacaaggctagaaccaacaacacttttagccatcatacgtgcatctaaactattaggagcattgatcacttcaacctcaatgagcttagtcgccccttcaccatccttggcaattttcttagccaactcttgcatgacaaaatgaagcatagctgaaaacttatcaaactccggtgtatctggcagtatttccttatttaaggtacagccattagagaggacaagaaccatgtcattagttgaagtgtcaccatctactgtaatttgattaaacgtcgtttcaacattttgactaagagccagctgcagcgtttcgcttgaaatgacagcatcacaagtaataaaggctaacatggttgccatattagggtgaatcataccagaacccttagcgacacctgccatagtaacctcatcacgaccaaattgctctgttacagccactgtcttaacttttgtgtctgtcgtcaagatagcttgcgcaaaatcatctgaattcccattgaccactaatttagaaagacctttttgcaaagtatccatgggcatcaagtcaccaatgacgcctgttgaagcaacaccaaccaactcaggagcaatctttagcttcgttgctgtccatttttgcatggtataagcatcttccattccttgaaggccggtacatgaattagcaacgcctgagttaacaacaagagcttgcattttttgagcctttttcacagactctctggtaacaatcagcggtgcggcaatgactttattggttgtataaacacctgccacacttgctggaacttctgacacaatccagccaaaatctttttttctctttttaaaaccagcatgtaagccatccgctgagaaacctagcggactggcaatatttccatcaattattttcatatcgtaaactttcaaccttctaacaacagcactcttgcaaagtaatatcttaaaagaatgactctcttttaaaaccaaaacaagcgcactcaattgttttcattgctcatcacttttaacagttgatgagctgaggtcctattcctttcttatcctttttataaataactaggtgtcatcgggaagccttctgtctcatcccatcccatcatcaaattgagattttgaacagcctgaccagctgctcctttaaccagattatcaataaccgaaatgactgttaggacattggttactggattataggcaaagccaatatcacaaaaatttgaaccaatgacattatgcaattctggcaagtcttgctgtaagcggacaaaaggcttatctgcataaagatcctgataaattttgctaacggcttcattgtttaaagtctgctttaaagtcacataacaggttgccataataccacgattaacaggcaaaagcgaggttgaaaattggatatgttccaagttgttatcaaatcgtttcaactcttggacaatttcaggaatatgttgatggcgatttaacttgtaagtaacgtaattatcatggacattgacaaaatgactggactctgacaagaccttgcctgctcctgttagtccagacttagcgtccacgatgatactgttcacatcaataagtttctccttaaccaaaggaagcaaagccaattcagttgctgtcgcataacagcccggattagcaataaatttctttcccttaacatctgtcaattcggccagagcgtatgtgaatttatccaaagatgcttgttcagctgctgctttcttataccatttttcataaatagcagcaggcagacgatgatctccagagatatcaatgactggaaaatcagctgcaatgaagtctttagctaattctttagcgacaccgctgggggtagcaaaaaagaccaaatcagctgtcgccattattttttgactatcaaaagattgaatttctaaatcacaaattccttttaaatatgaataaatatcagataattttgttccaatctccttagtagcatggacagatacgagctcaactttctgatggccatttaagattcggactaattctaatccactatatcccgtaataccgacaatcgaaactttcatacttattcacttcctttataaagatgttgtttattttatcgtatatttattcataagtcaagctaaaaatgaataaaatgtaaaaagtacctagtttataactagatactttaactcataataacaaaattatttcattttaaagctataaataagaaataaagcgccgtaggcaaattatttaaaatatgaacaagcatggaatccttaatatttcctctacgtgcataggctagatataaaatagctccgatacaagcataaaggacaaattcaaaaagtgttgttgcgtgcggaaaggcaaaaagaagtgttgtgatgatacctgctaaaaccttgtgactatttttaaaccaaaggtgattaggaaaggcacgataagccatctcttcaataataggtccgactatgccaactaaaatcacatacaaaagtgtatagagaaagaagccgtttttgaagaaagccgttaaactttgcaaagctgcatcattggtcattgtactttgtccagacagtatttgattaattaaagtccctgtaatcgcaactaccctagcgactaagaaaaatagcagagcaataccaatgtctttagctgtcattttttgagttgccacttctgctgagtcatgctttttgtgagcctgccacaagaaataaatgaccaaaataattaagacaatataaaccaatcccagaccccacttagcaggcaaagacagtttgttttgatactgcaagagatacataggaataatattacaaacaagtgataataaaatcaatccaataactttaatactatttaaaacaattttcattttaatctcctctgatttatttataatattctctgatcatttaaagtttataactaaaatacaaggatgaatgacagtagcaacagtcacgctttgagtaatgagaaaccagagctgcctccagcagtagcgataaacaacggcttaactcttcttactacagcttcgcttaactttttcgttttcttcctccattaaactaaaaacattctccacaggttcaccaaaagatttagcaatcttaaaggcgatgacaacagaaggtgtgtattcattacgctctattaaactgactgtctgtcgggaaatgcctgctaatttagcaagttgggtctgattaatgccatctctagcacgtagttctttaagtcgatttttaagtattggcatcaaatatatcctcatttctcatcatgctgataatgataaaagactaggaataacagcggtttcttctattctcactttttcaccccaatttgagttttcacaattacagtgtatcacccctttttagatttgacaaatatcatagtcaaatctaaaataatatgcaaaaaacggaaatcattttatttccgttttttgtttataaaagatattaataaaataaagtttacattttagccagtggtaaggcgacatcaactctgccgctggctgttttagcatcattggataagctcaagcttcctccatgcaaacgaataatattgtctgcaatagttagaccaagaccgctatgcttgcggtcatgacggctggtatcatcttggaaaaattgcatctttgctttatctaaagcctctcttgaaaagccctgaccgctatctagacaagtcaattgaaaaagctcattttccagatgacagactaactgcagctgactgccttggggactatgctctactgcattggaaataatgttcatcagtgcacgcgccaacaatcctttatcccaataagcagtgagctgagcatcagacaaattattgacaaattgaatctttatatctttcgttgcagcaagggcttggctgttttgggataattcttccaaaaaggctgcgacctttatcttttcagggtgaaaatcttgtaattggctgtttttagctagataggacaattgctgaagataggtctctacctgtccaatattttttaaactgtagccaacaaatgcctcctgagtctctgatagctccgtttgcttgagcagttccgtattccctttaatgactgtcagcggcgttttaatatcatgtgttaaggcagctatttgattttgcttctcctgctccacttgccagctgtgcatcaaggaatccctcaagactgctcgcatggtatctaagctatttaaaacttgattaaattccttaatatcagatgattgtactgtgaaatccaaattctgcttggctattttctgcgtagcagcaataatcggagacaattgtcgctgaagcctgcgggcaaagagtatcgtcactaaagtaaacacaagcaatactccaagccctgtcaaaataagtcctaatagactcacattaggaagatacttattcatccaggcaactgaataatgagcttccagtcgataattaataatataaacttcatttttaggcttcaaagtcataaaataaccatattcagcagaattgacagtttgtccagaataactgaccagagcttgtttctgcagctttttaggcatattgctttctttgatcttgccatctttggtcattaaaagataagtcgtgtctttgggcaaacgtttggcttgaaaagtatcagctttttcaattttatcttctaagcgatggagttcttgttctgtctgattggcaggaatgataagcttggtattgagacttatgacaaaaacagcccaaattaggcatagtaaagcaatgaaagccaaactaactgtcgcaaaatactgggtaaaaatcatttttaaagagcgacctgattttttcatttccatttatagcctatcccccagaccgtttcaatgggctcaagcccaatagttctaaacttagcccgaatatttttgatatgctctgctatagccgcaggtgttccccgttcttcataagcatacaaataatcataaagctgatctttagaaaaaacttgaccgcgacgcttggctaacagttcacagatttcatactcagacttggtcaaatcaagtttctttcccttagcagtaacccgcttagcagaaagatcaaaacggataggctcaagaaccagactagcatggtgctcacgcctttctcgacgcagatgggcatcaacacgcgccagcaattcctgcacaccaaaaggcttgcaaatataatcatctgctccataactaagccccgtgacaacatctgcttcctgtgactttgctgtcaaaaaaagaatgggacagtccaccaaattccgaatgtcccgacaaaaactgagcccgtccacatcaggcatcataatgtccagtaaaatcaaatcatagtctgctaattttgagcggtcaacctgattggcactgacaaaagtctttaccagatagttttgcagttgcaaggtattttttatcagagccaaaatatctgcatcatcatcaattaccaaaatacgagtcatgttacttccatttctatttgttatactgttataatcatatcatctataaagtaatactgacaaggtataaagcaagtaaatatgcagaggatagaaagcataaaagagatatttattgcctttacctcgtttgccattgtacattagcatcagaggagctgcaaaaatttctaaccactcaaaataagaaaagaagagaccatgaaatgttaacggaacacctgataaccatacacggcctaaatcaatgatcaaagaaatgatcacaaaagctataacttccctttttatagtttttcgacaaagatacattgctattcctacaatcaaagtcgctgttccaccatcaataatggaaaaatgtaatggcagaacagtgaaattcagcagattaaccacaaacatacctaaatcattgtctgaagccatgaaaagacgataaaaaggcataaagagaaagggaagaataatcggaaaaaggagtgtcggtatccctctaagatactttttctcctcgatccaagcaataccttgtaaagcaaccagtaagatagcaaatgaagacagcatcatattctttggaaaaaaaccatctccccgcaccaaagggtgaagcacattataaaagccaaactgaataagtcccattataacagctaagccgtaaatcttcaggaaatatttttttcggtcatgagtatgaataaaaccctcaataatagcaaataaaaataatggagcggctattctccccacttgagtaaaccataggggaaccttacctgtgtactcaaaaaaataatgaatatggtccaataacatggctcctagagcaatgtatttgagctgaaatcccgttagtgtttttctatttgtcataaatcaatctccttttcttttcataaaataagttttcaatgttaagcatacagaccctcacatatcataaagtgtacaaatgaaataaaatcaccatctaattggaaaagattataccaattctttcctaagatcttgtattcataatttttttaaccgtttccttggatagtaggatgtaagtgacttcctcaaggagttccattgcttattttcgaagcttcagtctcgaaactcctctcgaatattgccctgacgtcaatatcctttttagcacagcggaaactgttcttttacttctaccttatagtcgcttttgctatgccaacactatttcataagatagaatatttgctgtgaatgcagttctaaattctattcctcattgctacgtccttgccatctgtcgaaccagattatactaaggattaaagccattaaagttaatggaactgcaacttccagccagaggagaatctgctgggcaaaaataggattttgatcaggatactgcaacatttcaaacaaggttcccatcaaccgtgctggccaagcagcaggcacaaattgccagatattatcacctaagcctgttaaaagcaaggccgaaaccagaacttcaaaaatacctagaccaatcgttgccccgctatcaaataaaaaagcaataaccagatgcagtaaatataaaataactgttgatgctatcaaaagtaatcccgcataaccgtaaaaggcaagataggggacatctatttttgaacgatacaatagaccaaagacagacagagctaggcaaacagcgataatttccatcagcataagattgacaagctttataaaataaagaacttttcgttgactatttgctaggacagtttgaaaatgaccagcttccgcctctaattcaacagctttgctgcaagtaatagcaatgactaacggaaaagcaatccccagcacttgtaaataaccacttgtaatactcccccaagaataagcaggtgtcaccagaccaaagacagccgttaaaacagcgatgccaactggtaaaataacatgtatccaaggcaaaaaggtacggttatattttaaaaactctgcccaaatcaatttaaccattacttgacctcctgtttttcaaaccaaagagccgtcagccaggtcagtcctgcaaaaaggataagcgccaaagttaaactgagcataatggaccaattgctggttgctaatagcggtgctgcggcttctgatccagctttcagaccattgggatatattttcataagaggtatcatcaatcgtatgctccaagcataaggacacagcaaccaataagcagtcgttgaaaaagcaattcccaaaataacattagctgtgaaatcgactaacacggtgataactaggcccaatttctttgctagccataaacaaaatggaagctgccaaagtacactgagcaataagaccatagaagcaagaagcatttgactaataaggtaagtttctccataatgtggaaaaataaaatatttcaacaagactaaaataaaacaatgcaagaagctgctcagagtcaaataataagccaaagtcagcactttatttatccaaaattttcttaaagaaatgggcaaaggaaagattgctcgataatgcagctttttttcttcgtaagtatttattaaagcagcaaataaggtcagtagtcctggaaaaatcatgatataccaccaattataggcatccgtaatcaaatactgaggtaccataaaaccatgtattactaccaatagtggaccaagaaataataatttctttgccatcgtacgcttcagttttaatctttctgcctgaaacatgcccagcatatcactcacctcctcggtatctcataaccacatcagtaaaaagtttttccaagtcttcatcttggtgaattctatcctgataacccagtacgccattagcaatgataccaatatgatccgctgtcatctgaatctcagataagatatgactggaaataataactgtaattccttgtgtagggaaggaacgaataagattacgcaactcctgaataccaataggatcaagtccattagtcggttcatccagaatcaaaagttgaggtgagttcaaaagtgcgatagcaatacccagacgctgcttcatgcccatagaaaattgccctgctctttttttacccgtattggttagatccactatttttaaaacctcatcaatgcgactatcaggtaaacccagcatcaaggttcttacctttaaattttcacgcgcagtcaggttttcataaagtggcggtgattcaatcagagccccgatattttccaaatccttgcggctccaatcgtgtccgtctataagaatgtgaccagatgtctttcttagcattccagtaatcattttaagtgttgtcgatttgccggaaccattaggccccagcaaaccataaattgaacgacgttcaactttcaaattcaattggttaaccgctgtttgcttaccaaactgtttagttaaatttttcgtctctagcatataatccattatgatatcctccttttctgcttttagtataaaaaacaaatttaaggactttatcaggaaagttattttttatttaaactctataaaaattttttatgccccagtctaatttttattaattatgcaaatgatttgactaatagtataatgaggaaaacaaagaaaggtgatgattttttggagactgcaaaagactactatcgtttatttttcgctagttctgctattttgttgacgattttagcacagcttctcattcctaaatctgccgttagttttactaaaatccaatcttggtatttatattttctctggatttcttttgctctttcgcttgcagcggccttttttagtattgtacgccacaaaaaagaaaaattttatcacaaaagctattttattggtaccagctacttggcattggccgtttataattttgtcactgaaaagttgagcttactacctgagattttctttcccagtcccaataaaattctggcggtctttgtcaaaaatggtcctttcattctaaaatgcgatctcttttcactgcggttactagctatttcgtgggctatcggaattgctttaggcttactgacaggtattctagttggttggtttacctcctttaattactggttagatccgattgtcaaaattctgggaccgattccgtccacagcttttgtccctctggccttgacagcttttcctacaagctttgcagccagtatttttctgatcagtctttctgtctggtttcctgtgacgattttaaccaactccggcattcaaaatgtcaaaaaaacttattttgaagtcgcagatactcttggagctacaacttttcaaaagattgctcatgttgcccttccagctagcctgcccaatgtttttgtcggtattttcaatggcgcctgtaccagttttatcaccttgatgacagcagaaatgctgggtgttaaatacggtattggctggtatatcaactggcagagggaagtcttaggctatgctaatgtctatgctggtttgattactatcgctgttacttttagcttgattattacacttcttttcaaggttcgtgatagattgctctcatggcagaaaggatttattaaatggtaggatttctcaggattaatcacgttcaaaagatctttaaagcaactgatgatgcgcatacagagattgaggctctgcatcagattaatacagatattgaacccggagaatttatttcgcttgtcggcccttcagggagcggaaaaacaactcttctgcgcatcattgcaggtctggagaaagccagtcaaggtgaggtttggctggatgatcagataattagccagccctcgcgaaagctcggctttgtctttcaagaagcaaccctttatccttggctgactgtttatgataatatcgccctaggcctaaagttgaataaagaaaaagaacgtctggcagaagttaaagattatatcaatttagttggactgagtggttttgaaaaagcctatcctcataatctatctggtggtatgcagcaacgggtcaatattgctagagcattgattaataatcccgatgtcctactgcttgatgaaccatttggcgccttagacgcctttaccagaagcaagatgcaggctgagcttattgatatttggcaaaaacgccaaattaccatgatcatggtaactcatgatgtcgaagaagctgtttttctctctgaccgcgtgtttgccatgacaccaagaccagctgttattaaggaaagtattgcagttgacttgaaaaggccaagagaaagagactctcagaactttattgctattaaggaaaagctcttacacatattgaacttctaaagaaaagaggaaagcactaatgacaaaatattcaacccctaaatatctcggacttggacttattttattcatcatatcagtgagcttggtagcctgttcaaagtcctctatttcgacatctaaaaactataatgcttctgaaaaagattcttatatcctaaaaatttctgaaaactctgatctttgcggtgccccccaacaaatagctattgaaaaaggcttttttgatgatgttggcttgaaatacaaggttgttaaaatcggacaggatacttctaatcttgatgctttaaatgctggcaagattgatgcctctaactctttgatggcaagtattattcagcctctagctaatggtgctaagctaaaaatcactaccggcctgcatactggctgtctgcagatattaacaaaagatggcaaaatcaagtctgctgccgaactaaaagggaagaagatcggggtaactgctgttgcgggcagtcccgctatctttgctaaacgtgttctggcaaaatctggtttaaaagtctctgatgagaaaggtgatgtcagttttgttacttaccaaagcgatcagttagggcaggttctggacaaaggcgaagttgatgccattgccctcggtgatccagatactgaagttctgaaaaaacaatacggctttaaaacattagctaattcatcaactgacaaaggttttaaaaacgaatattgctgtgtcgcttatgtatcaaacgatatagtcaagaaacatccagctgttgctgctaaatatactcttgccatgcaaaaagcagccaattgggtgcaaaagcacaaagaagaaacggttgatattcagttaaatcaaaactatgttgctggcagtaaagacagcaatcttaccagtctaaacagctatacttttaaacctagctattcaggtgcttatgatagcttcgatactgtagccagcgacttgcgaaaaattggtattttatctaatgatgttgacctaaaagctttaagaatcaattccttcttaaaagtgaaaaatgttaaataaagcacttataaaaatcaggactgcctgtcaatatatctccctccaaaaagatgaatacaaaacctaacaattgaggggcagtttaatggtatgtggtttgtttcacacgagtcaggaaacggtctagaattataccattacaaaaaaggttttgggatatacccaaaaccttttgattagctataaaatagttcttttgcaaagataaattttacaaattctctgctactgcggcaatcaaatccttgatggctgaggcatctgaaccacctgccatggccatgtctggtttaccaccaccacgacctgaaacgattggtgccaaagtcttgatgagattaccagcatggatatccttagacttgctggcaacaagaacattgacctttttaccaatgctggccactaaaacaagaacgtcggagtaatctttttgtttccattgatcagcaaaggtgcgaagggcacccgcatcggcaacttctacttggctcgcaatatagcgaagaccattcacttctttaacatctttgaagatatcgcctgcggctactgcggctgctttttctttcagctcggcattctccttttgcaatttatgcaattggtcttgcagcgaagctaccttgttggctacctgattcatttgaggcgctttaagcgttgcggcaatttctttaagtatgtcttcttcttggcggtaggcttcaaaggcttccttactggtcacagctaggatacggcgagttcctgaaccaataccttcttctttgacaatcttgaagatgccaatttcagaagtatttttaagatgggtcccaccacaaagttcaacagaatagtcaccgatagaaaccacacgcacatttttaccgtatttttcaccaaagagagccatggcacccatttccttggcggtatcaaggtctgtttcaatggttgtcacaggaatagccttccagatttgttggttgacttcttcttcaatttgacggagctcttctggcgttaccgcttcaaaatgggtgaagtcaaagcgcaagaattccacttcatttagagaacctgcttgagtggcgtgattgccaatgacattgtgcagcgccgcatgaagaagatgagtagccgtatgatttttcatgacccggttgcgacgttcatgatcaatttctagatgataagttgtccctactgacaagctgcccaaaacatcaactgtatgaagggcttgaccatttggcgctttttgcacatctgtcacacgagcaacagtgtctcccttatcattcttgataagcccatggtcagctacttgtccacccatttcagcatagaatggtgtctccgaaaaaacaagcagaacttggccttctgatactgcttctatacgctcattgtcagcaatgataacagaaagactgctgtcaagtgcttctttttcataattgaaagtagatttttcggtaatgtttgacagagtttcattttgcatacccatggagccgcctttgacaacattggcacgcgcacgttcttgttgttctttcatagcagcttggaagccttgatgatctatcttgaagcctgcatcctctgccaattcttcggtcaattctactgggaagccataagtgtcataaagtctgaaaatatcttttccttcaagcgtatctttatcagcagccttcaaatcagccaaaagttgatctaacatgtttgagcccgcatcaatggtccgtgcaaaggtctcttcttcacgtttgacaattttttcaataaaatcttgtttttcaagcacttctggatagtaggattccataatcttaccaacagttggaaccaatttatacaagaagggttcattgatgcctaaacgacggccgtgcataactgcacgacgaaggagacggcgaaggacataaccacggccttcatttcccggaagggcaccatcaccaatagcaaatgagagagaacgaatatggtctgcaatgaccttgaagctcatattgtcgccatcttggtcatacgttttaccagatagtttttcaatctcacggatgattggcatgaaaagatccgtttcaaaattagtttttgccccttgcataaccgcaaccaagcgctctaagccagcacccgtatcaatgtttttatgaggcaattccttgtattcagaacgaggaacagctggatcagcattgaattgcgaaagcacgatattccaaatttcaatgtagcgatcgttttcaatatcctcggccaagaggcgcacaccaatatggtctggatcaaaatcttctccacgatcaaagaaaatttctgtgtctggtcctgaaggcccagcgccaatttcccagaagttatcttcaataggaatcaggtgacttgggtcaacaccgcattcaatccagcgattgtaagaatccttatcatctggatagtaggtcatatagagcttatcttttggtaagtcaaaccattcaggactagtcaaaagttcaaagccccatttgatagcatcatcacggaagtaatctccaacggaaaaatttcccagcatctcaaacatagtatgatggcgagctgtttttccaacattttcaatatcattagtgcggatggccttttgcgcattggtaatgcgtgggttttcaggaataacagaaccatcaaaatattttttcagcgttgcgacacctgaattaatccacagcagtgtgggatcattaacagggacgagattagccgacggctcgatagcatgatcctttgatttccaaaaatctaaccacatttggcggacttgagctgatgttaattgtttcatatttagatatagagtccgactgtaattgaacagaaaattaggaatctgacgacagatacttgtatcttaggcagactatctatttttcgacaatcacaggacgaattccctttcctttcttttcattaaaaataattgaacgagacaaacagaaaaagcacctgttaataggatgaattcagttttttctttaaagatcacagatagtctacagttaatgtgatgccgatgatcttgcagagcttttttcaatcgccttgacatagtcaatagcaatgaccagtgatatcactaagtctgcatattgatcatcatatacttcaatattataagtcgaggtcaggcgcagccattcctgagaaatactagcaacttcctgatcattttggaggagccgaaaattcatatcccaaaaatcaccttgaatttccatgtctaaatctttaattgtatagtgaggtttaaaaaatgacagatctcttttcaggaaaaatgtagaaccatcgtgtaaattgacataaaacttaggaaggaaggtccaagttttcctttggatacgactgatctgtttaccctgcatatccgaaatgataaatgtctttggaattttaaagatggagccctctacttgataagttgggattcctagctcatctgtaatggtaaatttaccgcctggcgaccacattttttgtttgatttgaaaactcttcatagctttttctccaaaaaacaagttcactgtaagaagggcgaagaaaccgcggtaccaccttcattcaatgaacttgtcattcttattatgttattctgtttatcaatcaagcagccaaatttttctatttgcatagctcacatcaaccgctatttttctgaagcaaatgagagaaaaattattcttgacaggataattatactgtctttttcaacattcgtcaatctttacaagtcctttattccgctgctgttgtctctgctgctgttgtttgatcatcagcggccgttgttgcagcgcttgaagcggctgttgtagtcgtcgttgaccctgaagagccacttccgcttgctgctgcatattgtgataagatctcactaaaggccttatctttaattttgacattagctttcttaaaggcttttccaataacagcattacggaaattactgtcatttaatttttgagaaacgataatttctttcagacgtttcttataagctttccaatcggcgtttttgtcagtctttttcgtgattttgacaatatagtaaacaggtttataagtcgttgaatcagacgccttaatgacatctgaaacgccatccttatcaagattcaaagcagccgataaaacttgactaggaagattagttgagcctgaatcaaagctatattcggtcttatctcctttggtattatctttagcaattttagcaaagtctgcaccatctgccttagcttcttctaaaacagattttgccttatcttcactatccaattgaatcacttgagctgttacttccggtttataatccttataagctgacttataactagcgtctgttatttctttcttagcttcttccttaacagcatattctattaatttttcagaacgaatttgtttcttataatcttcttttgtgtagccgcgtgaagccaaagcacttgagaaagaatcaccatagtacttagcagcttcattataagcttttgtcacttccttatcagaaaccttatcgccgtattgtttttcaaaaacttttgaaactaagagagataatacagcctgcttagaagctgttgaattctttacttcattataaaaatctgcaacagtaatagtatcacccttcattgtagcaattttactgttttggtttgtttttgaacaagccgctaaagtcacaatagaaagcaaagtcacaagtcctgtagcaatcgtacgttttttcattcttgataaactcctttttgtcattaacccttttattatatcataatttcttaaaaatgacttaatcaatcaaaccaatctctttgcggtttttacgaatcagcagcagaccatcaccaagcggcagcaaactgacagtcaaatcaggatgtttcagtgttgcgtcaaatagcttttgcaaaccacgataaatggtacgctggccgcgatgaacttcttcaattggcttagcaatatcaccgccttgaaaaacatcatctaaaacaacgataccgccaatctctaaacactctagaacagttggtaaaaaaacaatatattttgactttgctgaatccataaaaacgaaatcgtaattcccattcagtttagttaaaatattggcagcatctccttctagcaagttaatctgctttcgactatcatattttgcaaagttttccttggctagagcaatcatttcaggattacggtcaatggtcgtaatatttgcttgtggagcattctcagccatcaaaagtgctgaaaaaccaatagccgtcccaatttctaagatattcttaggctgaaaagtctgcaaaagaaaacgaaaatacacaacagtttcttggggaatgattggaatattctcctcatgagcaaatatttccaattcctttaaaaagcccatattttccttttgctcatgacgcatgtagtgaagaatgtcttccttaataacaggacgtcgcatgttgtgatttgcatttttactgtaagatttaaccatgatttttattataacaaaaattccctaacttaggttaaggaagatatttttagaaatctttcagctgagtcaagacttgtagattatcaattttctgattagcagctgactggggctgggctagattaatagatttgatgcctgcattttcagcaacttctacatctagacgtctatcgccaatatagtaagttctgtctctatccaaatgatatttctccagcagataaaagattccctgtggatgtggtttgcgttcaaatcccgacacacttgtcaatatttcagtaaaataagagacaattcctaattctgccagcaccgctccagtagaggcacctttatgggtatacataaattgcttaattcctctgtctttggcccactgcagcgcttctttggcaaagggcatcaacttaatcttatcatcacgcttaacttgctcttggatgaagaaagtttttaattcttcagaagaaaggccgtgctgtttcgccagtatgtctaagagtttcccaaccgattctttgataatataacgtcgaataggctctgcttgaaaatcaaaaccaaaagtcctataagtgaccgcaagagcctccataatggcctcataagaatcaatcagtgtcccatccaaatcccaaataaaagctgtttgtggcatattttctccatttcattaaaatttcccaccatcaaaaataatgaatagcatatttgattactttctatatctaaatccattcaataacgtgctaattgaatgtcttgcccacgataagtttccctaacaattccttccaattgaccgccgattttttcaagcagagaacgactgggaaaagtgttttcatcctaagatagcttttaagctatcttattaatcaattcctttttcgaccaactcttccaactctattaaccgttcttcaaagactttgaaggcttggtcaatataggtcgactcagtcatatcaagacctgctttagcaataacattgagaggatagtctgaattgccagctttgagataattgagatatttgtccttatcttcttgattgccatgaacaattttgtgagccaaaaaactagctgcagcaaagcctgtggcatactgataaacataaaaattgtaatagaaatgcggaatcctagcccattcatactgaatttccggattatttttcttgcttaaaccatagtatttttcattgagatccgcatagagattattcaaataatcactggtcaaaacgtcacctgcttgatcagccttataaatcaagtcttcaaattctgcaaattgtgtttggcggaaaaccgttcctttgaaaccatcaagataatgattcaaaatcgcaaaacgttgcttttcatcatttacctctttgagaagcatttcagttaaaatattttcattggttgtcgaagcaatttctgccagaaaaatagaataatcaccataaacatagggttggttttcacgtgtaaaagtagaatgcagagaatgtcctgtttcatgaacaagagtgaagaggttatccaaggtatcctgccagttaagcaatataaaagcattggtgtcataggaaccacctgaataagcgcctgaacgcttgcctttattgactcgtacatcaatccaacgctccctaaatgcacgatgcacacgctcagcatagtctcgcccaaaaatagctaacacttcttctgctttgtccaaggctgcttcataagtaaaagtcatatccatttctgagagtggtacgtaaatatcatacatcttaagatcatcaaggcctaaaacgttttgccttagcttcacataacgctgtaacaaaggtaagtgattatggaccgcttctactaaagtgtcataaacagtttcgggaataaaattagctgccagagcagcttcacgcgcactcttatagtttctgattttcgcttgaaaattattaactttaacattggtttgcagcgttttagcataggtgtgttgatactgctcataaatgctgtacatggccttataagcttcttgtcgaactttgcggtttttggattccatcaaactgatgaaattaccatgagatagttcaacttcttctcctgtctcgtcttttacccaaggaaagataatatcggcattgtcaagaatttcaaaggtttcaccagcagcaccaaaaatttcactggcttcagccaaaagtgcctcttccttttgagaaagaacatgctttttttgtttgaataatttttcaaaaaaatgttgataaggcaataaatccggacaatctgccaaaaaatcctgatattttcctgttgataacagcataaattcaggctcatagaaggcaaaagtctgattaaatttagcgatcaaggctgttgccttagcttgtaattcttgatagtaactgaccgtggtgtcttggtcattcttcatagaagcataaacataaagtttttccaaacgacggctcaaagccagataaagttctgtgatctccagcagactttgactggagtcaagcagatgacccgctcttttaacggctatttccaaatccttagctaaagatttctcctctttttcccaagtttgatcgtttggaaaaatgctggtcaaatcccattggtgtttttcttcaatatgactgcgattatcagacatcactttctcctttataactttttatttcattttatcataaaaggctggcggatacagtgtttgaatttctttgtctttttgcttttgataatattgaaaaaaagctgcgctaaaatgagatacatcctgattgatttgacaaaagcctcttgaacattgcggtaaccttacctgcgggaaaaaatcagcatctgattgtgctatcagattacgcccctgtgaataagcaagttcttgctgacgcagccaacgcggattgcgtgctagcagttgtttttgaatggctaaaccaacctgcctgcgctggtgaacaggataagaagtcaaggtttgcttagcatagggcaattgtaaaaaggtcatgatattaccatcaaaagaacaagatctcgtttgataatagactttgccaaaaatatcttcataaatcaagtacttaagtcgcaactcacgcctattaatatctaattcccaaagatgaaagcccatattttgtgaaaagtaaagaaattgtttgtgcaagctggataaacgcctatccaaccagagtttctccccaagcagccacagtacctgataaccattgacctgataggcctgcgttcgctcacacagacgagcttcggacaagcgagaacactgaacttctaatgctaggttatgattaactaataagtctgcgatttgttcaggttctggtatgactttttcgatctcaacactttccgtctgagataatgactgatagagttctgctttcaagtttaggtgttcagcggactcattttcactgtaaaatttgcagtcttgcaaagcaacatgggcaaaatgcggacgcataaccctgccgtttttgagacgtacagacgattggcaggcaggacaataaaaatcacttttgttaggaataccattcagaagattaatcaactttccatttttatcccttgcaactaacatcaaaaattcctttctaaatagatagttaaaaaacccgcgcaaaggcaggctttaaaaactacaacttcaattatgactgataataaattccaaacaaatagtttaaaaaggactaaagtagatttcacttatactattcgtaaatcccaacaaaaattgatgtctttttcaaagttttttaattttttagtgttatcaataaaaattagtcagcactttaaacagcggaagaatgacaaggaatctaactctcgaaaatttctaataaatttatattttaaagtattattattttttacctaacctcattttaaatgcaaaactcgattaataaattgtatgcacaattttttccaaataccaagttcttcgtaatccgaaaatttcgcttgtgtattgctattaatcacggataaaccgtgctctcctaacgcaaacatatgaagttcatataagataccattatctttcaaacgtttagcatattctaaaagagcattattgtagatgcagtcatcatcttgcattccccaaataaaagttggcacagtggctggagaaatgtgctctataggactgtattcttttaaattttctgttgttaattctttacctacgactgttttcaaggcacctgttagaaaatctattttaggcattggtgatagttttgttggcatctgattatctggatcaactgatactttctcgtactgataattaaagtccagcaagggataagacaagataactaaacttggttttaaagtttctccgggataatcaaagtatttctgtaaaaacggttcgttccaactatttgctaaagaagcactgtgagtggctcccgctgaaaaaccaataaaaatgactttttcagtatcaatattccaattttgtgcattttctctaacgatcaaaagcattttggccaaatcataaagtggtttaggataaccactgccttttccaacggtataatcaagtgtgatggcctgaaaacctttgttcagaaaataaagtgcgacaggctctttctccctatctgttaccttgaaaaagccaccaccgccacaaataatgacagctggacgaggatttttatttttaatatctggtgttttttcaattaagtaagtcgtataggtcacttctgattttgctttatcttcccaaagcatagaggtattaattttcattgttaacaactcctttcacaaataggatatttaagtattaagagtcacttttaactttaagattagtaatcttatcaccatttatccttactaagtcactacctgtcaaagcaaggtactttccagtttttctgcggcatacaaccgcccaatttgcctgcgcaagtcatcagctatttctttagtatcccataaatgtttcaattctgaatttttgttgaagaacttttcaaaaaacggattaatttcttctctaccagaataagtgttaccatcattagcttctatgatagcattctctgaaaataaattgcaaagttctgtcaattttcttttatcctttcctgctaaatcagataaaacaaagtagcgatcaagtatattcattagacatcatcttccaagaataaaaatagttcgatatatatcgaataatcgaattataacgctaatcatgttaaaatgtcaatacaaaataacttatcatatcactttaaaatcttaagagaaagcggaattattcatgttagaaagaaggtagacaacgttttatctcacttagataagcagagttagataaaaaatttcaggcttgctgaccgccatttataaaatcagttaatcgattgctttaaggaactaagatgatttttctattttcttttttagcttccatcaaatcatgcgcttctgcggcttcgtcaaattttttgataaccatgtcttcctccagtaattgtccttgcctaaaagcatcatttaaaattcttcctgcttttttcagttgcttcaaactagcgtgactaatcacaaaccctttcatttgctgacagttcatataaaactgtctgctatcaaattgactgtctttcggggctgtaattaaactaatgacaccttttggggcaagtaaatcgcaattaaactgtaagggaatttccccagaagtgtcaataatgtggtcgaaaccatcaggataagcgctttttagtttcttaaagagtgacttatcacgataatcaaaacagatagcgtcgctcaattgttttaatcttgaaaaatcctgtaaactagcggttgttaccacctctgcccccatttcattagcaagataaaccaacttacttcccacatggccagctgctccttcaataaggagtttttgttttggcttcaattccatgatatcttgtaatacgatagttgccgttgctgccgagtgcactgcaccaattaattttagagagtcagcattcttgggagtaagaaaaaggcgctcttctggaattaatgcatactcgctagtgataccttgccttccatcatagcccatactattagtccaaacgcaatcgcctactttaaactgaatcacatcttttccaatctcaacaacttggccgatagcatctcgacccaaaatataaggattcggcagatctgtctgataaatacctgaacgaataaagagatcaacataattaatagaagcggctataacttttattaaaacagatttcggtctaactttgggaacaggtaatgaaccaacaataatcgttgcgggtccccccgttttttgaatataaactgccttcatattctacctcccctcctttttctaaaacatgttacaatgatagcaataatccatgtattcattataaaagaaaaagtttactttatatgcccaaaattgtaggcaagacaattttaaggagaaagacatgcctgttaattcatttgacaattatcctatgacttggaaaccagataaacaattgttaaaagctcctctatataccagcctagctaaactcttagagaaagatattatagaaggacgtttgactgctgaaacaaaattgccaccccaacgtgaattagctgattttttggatctcaatctaagtacagtgacaagagcttttaaactctgtgaacaaaaaggtcttatttacgctattatcggcaaaggaacctttatttcacctaatagggcgaaacctttagctactttaccaaaaaatgagacacttattcctcttggcaatttgcatccttattaccaacttaattatgttgtatctgatatttccagacgaatcttacagagtcaatctgttgataggctttttgaatttgacacgaaaaacaatacgcaagagcataaagctgtagctcaacaatggttgaaaaagtttcaaattaacactctcaaagagaatatctttctaacttatggcacacaaaatgccttagttttgttatttttaacagtgtttaaagcaggcgataaaatagcgactgatacatttacttacaccaatttcattgccttagctcagcaattcaagattgaacttgtcccaataatatctgatcataaaggaatcattccagaagacttggaaaagaaatgtcgccagcaaatgatcaaggggatttacttggttccaacgtctaataatccaactgggataaccatgacattagaaagaagacaacaacttgtttcgttgataagtaaaaaccaccttctcctaatagaagatgacacttatgcttttacaaactatgaaaaattacccgcgttgacaaccatgattcctaaacaagcgatttatattcatggcttatcaaaagccttgtttgctggtctgcgaatggcttatatggtggtgcctgattatcttattcaagagattaatctcactgctgatgctatcaatgcctgtccacctctattaaatactaagattacgagcgatctcatttcaaacggtcaagcagatagtacaatagcgcaaaaaaatcatttatctcaggaacgaaatgctctctatgatcattatttcccagaatccacttcttccaatccctacaatttatttcaatggttaccattacctaaaaatagaagcggctatcaatttgaatccttggccaaagaaaagggtgttgaagttttatgcgcggaacgctttcttgtcggtggactgacagcacagtctgctttgcgcattgcaacttgctcaccaaatacactagatgagcttgacaaaggactccatattttaaaatctatattagagaaataactcaagtcatcactaagaaaagattaaactaaaatgagtgacgcattactcagagaaagtagaatcaactaaacataatgttattccgcttaggaaaaataatctattccctctgtctgtaaatcacaaaccatgataaaatctgtctcattttcaataatggtctgaaaaccagccttttgatacatgttaacagcataattttccttttggacagataaagaaactttgtgatagcctttcttcctgagatgttctaagaaagtcttgagcaattcggtaccaattccttgtccgcgataagcaggcagcagagatatggctagagaaggtgtcttctcatcaatatgaccgtaatcatccatgatacgacaccaagcagtaccaacaatttgcccgtctctttctgccaccatggcttgatcatgtagagatttcccaaaacccttcacataaagctgcagctccggtagctggataatacttctatcaggtactggtaatccttgaggtacaaaaatggcctgataaagaaattcctccaaaagtgaatattcttctgctatcatttgacggatagtggtggtcataggggatcctttacttaattcaaataatttctaaggctgttcttctcttcggccgtcagctcccgatactctccaactgacaaatcacccaattcaaaaggtccaaaagagatacgtttgaggtaggtaactttaacaccataggccagaaacatttttttgacttgatgaaatttcccttcggtaatcgtaatataggcacgactaacttctgaactagagctgataatctgtaacttagctgacttacaaacggtaccatctaaaaaagctatgccattgtcaaaaaaagcaatcgcatcaataccgagatcaccattgacctcaacataataggtcttgtccacatggtatttggggtggagcaaacgaaaacccagcggaccgttgttggtgataagaaccaacccttcggtgtcgcgatccagacgcccgacagggtagagtccttctctacgatcaaccacagcaataagatcaatcaccgtctgatagtgctggtctcgcaccaccgataccaaaccagcaggcttattaagaatataatagacatgaagagaatagctcagctgcttacctgacacggtgatggtctgtaaactaggatccacattttgattgtctgttcttgcaagttcgccatccacgcgcacttgttggctgcgaatgaactttttcacctgacctcgtgagccaaaaccagcctgaccgagtaatttatctaaacgcataaatttattgtatcatgtcagaccaaatttttgcatattttaaggataaaagtcaaactatcattaattagtaatcatcaaattgaaggagatttcatgggacttttacagaatggaaagtggggagatctttgaataagcggacggtgtcattgctgactctgaactgcatagcgattacctttaccaaatctacttggctgcgtatcctgattattccggataggtaatggtgccagtcctttgggataaacagactaagatcattatcaacaatgaaatctaccgaaatcatgcgtatgcttaacattgcctttaatgacatcacagacaatactgaggattactcccccaaccggactacaggctaacattgatgtcatgttgactctgtttattatagacatttcaaatgcaatctccgccgcctcgttgactatctcaatcactggaatcacaccaagcgcatttacaatatctctagcattgctactatggttaactttaagcatattaaaaacattattacggcagccacaagaccatcaatcttacaagtatcgtttctgtcggaccagatttgggttggtatctttaaaaagagacactgaaaagtttaaaacatagacaaacacatcctattctactttaaaaaggatttgaaactaaaaacaataatagttataaactcttagtaaccctgttatatcagttcttttaagaattttatgttaccaatcaaaaagaaaaaagatcaaaatgacccttttcttccatctaattttacttatttattcacagtgtgctgcgactattgatttaaattcctgctcctgctttttcatcaacaatcaaaataaccttaggatgtgtttgcagtatactagctggtatttcttctgttacagggccttttaccattgcagcaacagcctctgctttttcttcaccaaaagccattagtaaaatcatcttggcagacataatagaggccagtcccatagaaatagcttgttttggaacatcttctgctttttcaaaaaaacggctattagctgcaattgtagacggtgttaaatcaactagatgcgtttgacttgaaaatgctgtccctggctcattaaaaccaatgtgagcattgcggccaatccctaaaatctgtaaatcaataggatattgggcaagaatttgatcataatactctgtctcttttgctaaatctgctgccagaccgtttggcaaataagactttttaaaaggtttagcagcaaaaagattttgcttcataaaataagcataagactgcttatcatcggctgacaaaccaacatattcatcaagattaatagataccatatctgaaaagtctaaatgagattctcttatttctttatagagctctaaaggggtgctgccagtcgctagccccagagtcttagcaccagcttctatctcttcttgtaagatcttaaaagcaaccttgctgccttctgttttattttttactttaatagttttcataacaccctcctaattggtctatacaaatagtataaggtatagaccaatttttgtcaagctttagataaaaaaacagactatcaggattatggtataatcccgactgtctgatctaacttcttcaaaaacttaaactgaaaaaagttgtcccactaaataagtaaccagcatggttaatagtcccactatcaaattacgtctcatagctggtctagttggcgcaccgccaagtctggcactgacatagccggtcatgagaagcgctaacccaacaacaatgactgttgtcggaatgcgaatcgtaactggaaacagcaaaatggctattacaggaaatatagaaccgattgtaaaagcaaaaaagcttgaaacagcagcatgccaaggattaacaaactcttcgtactcaatcccatatttttcttcaaccatagcctttacaggtgattttaaaaaagcctttctggttaaaagttcagcggaagtttcacattcaccatttttaaggtaggcattgtgaagggagcgtcttgccttttcactatcagtcaataaaagagccttttctcgcttaacagcggcctcttcagtatccttttgcgtactaacactgacatattctccacctgccatagaaaaagcccctgcaagaatagccgagagccctgacaggaagataaaccaaatatttgttgttgcactggcaaccccaatgacgactcctgcgaccgaaataataccatcattagctcctaagacacctgctcttaaaatattgagacgtcctgaaaaattatcatctttttgtactattttttcttcccccatagtttcaattccttttgtcatataatattattatacatcttatttagaatgattacaaataaataacctatctttaaaataaatagcaacatttcttagccttattaaggctctcatgttataatagataagccatatatctgataaaggagaatctcttgaatacaagtgactttgattttaacctgcctgaagcattaattgcccaaactccccttaaacagcgtgacagttccaaacttttagtcgttgatcatcagaagaaaacaatgaaagatacccattttgatcatattattgacgagctcaattcaggtgatgctttagttatgaatgatacacgtgtcctgcctgcccgtcttcatggtgagaaaacagtgacacacggtcatgtagaattgctgcttctaaaaaatatacaaggagatcaatgggaggttttagcaaaaccggctaaacgtcttaaggtgggcagtcatatttcctttggagatggccgcttaaaagctatcatcaaagaagaattagatcatggcggacgcattgtggaattttcttacgagggtatttttctggaagtcttagaaagccttggagagatgcccttgccaccttatattcatgaaaaattagaagaccgtgaccgttatcagaccgtttatgctaaggaaaatggctctgctgctgccccaacagctggcctccattttacagaagagctcttaagtaaaatcgaagccaaaggcgttaaactagtctatttgactctgcatgtaggactaggaacttttcgtccagtctcagttgacaatgtggaagagcaccaaatgcattccgaattctacagcctatcaccagaggccgcccaaacactaaaagatgtcaaagcaaatggcggtcgtattgtggcagttgggacaacgtcaattcgtactttagaaactatcggtaataaatttgctgggcaaattgaagcagattctggttggaccaacatttttattaaaccgggctatcaatttaaaattgttgatgctttttcaactaattttcatcttccaaaatcaactctagtcatgctagtctcagcttttgcaggacgtgattttatccttgatgcttataagcatgcggttgataaacattatcgcttctttagctttggcgatgctatgtttgtaaaataaaaaagaattcctcaaaatgaacagctcaccaaaagttaggacaaatcgctaaccttggcaaggcaaatcatcttgggggaatttttctttttattctgtccataaaaattttgtaatcatttattttaaaatcagaaattctgatattccctgtcttatatcgttttacaaactgcccagtcctgctataaacgatttctaaaaaatgcaagtgtcttttgccaagaatcattcgtatcagccataattttttcaagggcaacctttttataacggtgattgggctgataggctaccgtcatcatatgaccgcaattttcataactttctacttgatagggatatttaaatcttttctgctgtagtcggttaacaatagttatagcagaaccgtaagcgtcccaaacttcatccttcttggaaactaagagtaataaagaaccattaattttctcaacaggaataacagcctgatgattaatattctttaaatctttttttaaaataagacgttggaaaaagtctttccacaaaaaaggatgataagggagttcttgtccttgataagtccacgaagaggtcttagaattgcgccattgcttaagaccttccaaacaaagataagaaggagaattaagcactagacacttaaaatcatcataatgactagccgccaaaagagcaaattctgctccttttgaacgcccataaagtccaaggcggatactatccgcatagggtgactttttcaaataatcaatggcttcttggataatttcaagcggaattttctctaaatgagaggcaagaccttccaaaccaaaataagcaagagctaatgtggtaaaaccatgactggctaataactgcgcaatgttttgtgccttttcaattctgccatcactgccgcttaacacgatgattgctggttgttgagaagacgttttatcataaaaaaaccgtcctttggctcttgaaaagttcaaatctaaacaactgatgcttggcagctgataataacgtctaacgcttgtctcccccaataaagagtgacctttaaaaatactaattttcaaatcataaaaaggatttaagggaatgctttctaactgctgacttaattttgcctttttacaaactatcggttgacttttaaaaaagagctccataatggacaagttatgataaggattagattccgataaatctaatattcccttatcatctgagtaaaacaaagcttctgcctgccaaggagcctgagaagatagattcattggagcattaatattataataatgatcaagatctagtctcacttttacttgacagcaagggggcaaatgttcaatgataagctcaaaaggacaatctgctaaatgattattttgactttttagtttaaatgtcagcatgttatctccttatatgttaagctgcttaacaaaatgatttttaaaattaccttgataaccaaggcaatcctttccaaattttttccagatcagccatcatcgcttccaaattggctaagaaatcttgaggataggcttgtaaaacagccatcactttcttttcaagataagcgtgctgcttttgatgaacctgataaattttctggccagcccttgttaaagacaataacatttcctgacgattactttcattaggaactttaattaaaagccctttgctttctaatcttgaaaccatttgagtcacagcactacgagagattcctcgcacttttgacaggccgaccaaattgataggctgattttgagcaatactaacaagggtatgcacttctgctgtattgagagggatagcaccttttatcacatgctgatttttttctaattgggcataggtcgcaagaaaatcttgaaatttctgattaaaagcaatgagtaattgtttatccataaaaaaacctctttgttaagtatcttaacataaagcagatgaatgtcaagagaatgaagataaaaatctcagataagtcccttttctccctccatttttatcagcctctttgttaagaacaaaagcaaaaaactagcccctagtagaatcaactcagtcaaaagcatgtttgacaaaatcttttcttgataaagcattgctggtaaatcaatgagagcatgccaaataatggccataacatagagattcacttgctttttcttgacagccaaatagacccaaatactcaacaaaatttgtacagctaaggctataagacgctcaaagacaggcaaaaaaattgataaaggtgtcaaactctccgtttgtttgatgactatttgagaaagtccttctgtttgacccgacgatatcatctgtgagataagcaggaaattaagtaattgtaacacacctaaaagtaataactcaatcccaccatgacccaaaccataaccaatagcatctctaatttgtaaggtttgcctagctgataagtacttaaaaatcagaaaacgggcagtttcttcaaagagaccagcagtcaaaatgccataaagagcataaagatagggatgagaagtcatcaaccagttactaccatccatctgaggatgcaaaatcatcagatggagcattctctccaaaagctgtgatgagacaaaaaagcccagagctccaagaccaacaagagcaaactgaaactgatattttcttttcagaaaaataaagacgacaagaaaagcaacaagtaaaacaaacaaggcagagctcagaagaattaacatttttgactccttttttatttagactattttctaaatagactgtactactttcccaaaaaattgtcaataagtatttcgattcttttctaaatagtttcaaaaataaagaagagatagtcaactgtccatgtttattacatcaacatgactaacctctcttatgattaatttcgattaacacgatgccattcattgataacataggtaagctgacacaactgtgaataaccgagaccattaacctcatcattatcagatgtcacaccccctaagccagctgtataaattgcaattaaatatggtgtctgctcataaacaatagcatcaatatttaaggcctctctgacataaccaggcttctgacgaatatcaatatctggcagatacgtcttataatacaaatttggaaaagattgactaagataattaagaatatcagcatatttatcttggtgtttccaaagataatcaagtacttggatataataatctgtcgttgtcttattaccattttggtcaattgttttgacatcacccttagattggccataacgtttaaacattggataaaccttatcaaaaccaccaagcgccttggccatagcataagcaggtgtattctcagagtaaaccaaagaatattcctgcatctcagaaattgtcatatcattaccaaattgattacgataggcctgatattccccagcatattcataatcaagatctgtaatatcatagagagtatccattgatagttttcctttttcaacggcatcaacggctaacatatttaaaggtaatttataagttgaacctgctgtcataggctgtgtttcattcatcgcaatgacctcattggtctttgtatttttataagagaaagcgatatttgcatgatcaatccccatttcatccatataagtttgaacaacttgcggaagtgtgagattggcataatcataatgtaatccaagagcatccattcttgctgcatcagcatctacgatagcctgtttctcttctgctgttttttcaataacttgaggagctggttcacttgattcgggagtcttagcactgctgtttttctttctctgacctattgagtgattattaaaaaatgactgcttcataatgtgtttcgattgtaaaacaaatgctaaacatatgatagctaaaacaatgcaaacacttaatataactgatataactgactgttttttattcacaaattttctcctagccttatcattataaaggacccttagcagaataacaagagaattagaaaaattttgtaaaatagaaacttttttgaaacaaaaaaaggaataacctcataattgtaatgagctattccattcttaataacagaggaaaataatcattttatgacacagccgcatacagatttacttcgatcctcaattccatcggctaggcattgatatcatacgaaaaattcgatgaaactttcccagagaactaactaaaaagggagaacgctagtttctccttttttagaactcgtattataacctttttaacagttttcttaggtcgcaagagaaagcaaaacgcagaaattgtcctcagtttccttttaaacatcaaactgaaggtctcgaaaatcttctcaaattttgcctctgatggtcagtattttttgcactacggcggaaattgttcctttatagcgtatagcgaccttacggttgcttttactaagcagcacttatctcataaccaaaaaggtttctgtaaatacaggttttaaggtttatttagtgagagcttcggcataaagacgagcaacagtgttccaattgataacttcaaagaaggctttgatatagtttggacgaacattacgataattgagataataagcgtgttcccagacatcaagtgctagaattggtttcaagccctgtgaaattggagtatcttgattagctgttgaggtcactttaagttttccttctttatcaactactaaccaagcccaacctgagccaaaacgcgtcgttgcggcagctgtaaaagctgctttaaaatcatcaaatgagccaaaagcttcattaattgctgcggctacttccgcagtaacttttgtcttttctggtgacaagagttcccagaaaagagcgtgattaagatgaccgccaccattattaatcaaagactgacgaatatccgctggaatttgttccacatcagccaaaagcacttccaaattttctccgatttctggatgtttttcaagagccgcattagcatttgcgacataagttgcatgatgcttatcatgatgaagggtcatcgtttcagcatcaatatatggttcaagtgcgtcataagcatatggaagatctggtaaaagaatagccatatcatttcctcttttctttttttgatacatcttcatcatatcgtaaaaaaacaaagcttacaactattctgcttacttattttatacggcatgcaaagaggtcttagtaaaataattctaaatatacattcttgctttgacagaaatcatccccgattttcatgagctaatttaagcaaagctacatcaaaaagatagtccttatcgtaagtcccgctcttaatagcataatctgtttcaattaacaacgtcacagcctttttcaaaaaaggtaaagtgagtgttcttgaatcacgtaaagcaaatttaacctgatagggattaacttttcgccctaaatagtctgataaagctgtcactatttgagtctcagatttattttggccacttaaaatttttatctgagtgaacatgcggaattgccccaacatgactgcaattaacttaatctcatcttctccctgaagacgcaaatcacggattaaatcacgcgctgcatcaatctgtcctgtcaaaataaattgtgttaaatcaaaaatattatcctgtaaagtcttgggaatagtctcactgatgtcttgagccctaatatgtccatcctttttataggaagtcaggaaagtaagatttttagcaacttcactaaaatcaaagttagactttatcaacaaactttcaaatacacctgattcaaaaaaaagaccatccttgtgtgcccgcttttgaaaataagtacgaagctctgtttctttgagcactttcgcttcgaaaagctgagcatctcgttttaacaatttaactaaacgacgtttaccatctaatttcccagaagcacaaataactaattttgtactggaaagaggatttcctaaataggcctcaaaacgcttcaattcgttattatttaaaaaagtttttttatccgttgtgatgtctgcaaaattatcaaaaataacaatcttctcatcagcaaaaaaaggtaaactttctaaatccatttctgcatcctgataagacgtttcagacatatcaaaataagaaaaattcaaatcactcggttcaaagccaattttattaaaaaagagttttttcatttgcccatattggccaaaatcttctccacttaaaacagtaatggatgcaagttcctctttttttaacttttcaatcatttctatagcaatcatgtttttattatagcaaaaattaaaaagagcatgaatattaaggttagaaaaatctctaatactcttttttcatttttatgagtctatgcgcttcttctattaatgaccatataaaaaaggagcctgagattcgtttatctctgactcccttgataaatagagttatcttattgttgattagtaggtgcttgtggttgttgcactggtggagtttgcggctgttgaggagttgtctgtgactgtggttgtacctgagcctgaactggctgtccttgtggagccatttgctgaggctgctgaggagcaattggttgtacaggcgcctgataaggtttacttggttggcaaagcaggatgtaataaaagatcaatgcaaaccaaactatgatagatacaattgcacgtaaaaatggaatcagtcctaagaatgaaaataaaactgctcctatcggaacaaaaattaaggaccaatgaaaaccggcatcgcgtaaacgacgaatagaaatagctaaattaggtaataaaatagccaatgaaaaaaggacaataataacaaagagaataataacatctattgagtaaacagacaaaactgactcttcaccagaaaaagtagaaatagcagaacccctaataaattcaattaaattggaatagaaaattgaggtagccgtaaaaacaaatggcaacataattaaagaattgcacaagattgcccaccaataatctgaacgacttgaacgacctgtaaaattaacatagtttgtccagaattttttataagctgtaaacataaaagaaactccctaataattttttctctacaaggataacataattttgaagggaaaacaagtttgccaaaaggcttactaggttatttcggacagaaaaattatcatttgagaaacttaaaaatcaatagttaacatcataatcactcaaaaaatttgacacgatgaaagaataaataaagcatttatcgcacagtctcaatctgccaatgcttaagacccttaaaacgaatggaaccctcttgatccgtccgataaatccgactttttatttgcgcaaatctgtccagtgtctcctgatggggatgtttataacgattgttctttcctgccgagataagagcaattttaggctctatttgagctaataattcaggtgaagaagaaccttttgaaccatgatgtccagcttttaagacatcaacttttaaattgggataagtctttagcaattctgcttctccttctttttccaaatctcctgtaaagagaaaatttaagcctagcaaacgtccataaagaacgatagagtcattattaccaccatcacctattttcaacggatagagtacctgtaaatgactccccataatggataatgtctcccctggcttagtgatgtgtaccttaactttcattcttctcaatttactgacaaaatttgccttagttaaactgcctggactaactaaaacttccccaacatgaaaggcctttgccaccacttccatatctcccatatgatccgtgtcagtatgagtcaaaaccaattggtcaatcttatcaatgcctctgcttttgagatagggaatcaaagtcttttcagcattagtatcactgatacgccgccgccatttatcagtctgtccaaaagttacttttcctcctacatcaattaaaatagtcttactgctgatatcccgaagaagaatactatccccctgaccaatatcaacaatagtcacttcattagtcaaaggatttttactgatgaaaaataacagggcgagaatgctactaagtactaacactaccctttttttctgacgaaaatcatagagtaaagctaaaaggcacaataaaagtaagagaataggcaaagtcggactgcccaaaataaaaggacgactaaagattaggtgaatttgaacaattattctttctaataatctaaaagctggattgaagcaggcaagtgatacaaaaggtgacagaaaataagcaagtgtcaaaaaaggcaacatcaagttatcaaaaataaaagaaaagaggatagttaataggatagacaagggctgaaaactgctaaaataccacatcaataacggtaaaatccctaaagaaagagaaaaggtttgaaatagaatccgctttaagagtgacaaagtctcaaaatcaatcatgattagaataaaagcataggcaaaactaagcacacctcctgttgttaataagaaattgggtatcaggaaaaacataacaaataaggttagagcaaagttatcctgctttttaaaaccaaaatgagtaagattactttgaatcaaactacgcacaacggatactgcaaagccagtcaaaccagcataaagcaaagaaaagggcagctgaatagcattcatgtattcctgtctaatacctaaacgcaagcccaaataacgaaatttcccaatgaaaaaactaacctgcatacctgacaaagcaaaaaggtgaataatacctaagctagaataaatagcattcatttcatcaaaggatttatctaaatagccaaaaagcagaccagtcatatagtgtttcatggggtctggaaattttgactgaatagataccaaaactcttcgtcgccattcatgcaaacgagcaaaccagaagcgtttagaactcagtttaattgttttaatgtctgtaacattaacaattcggtaaattccctgcatctttaaatagtttctataatcgaatcccttgaaattacgctgctcttctgcttctacaacatccgctgtcacttgaatttctgctgtctgccataattgttcaaaataatgtttctctgtttcagattttaatttataaaagacctgataagtccaatgacctgattttgctcgaaaacttaagttatctccattgacactaagcgtatctggaatgataattaacttttgaacctgtctgggtactatttgatactcgctttgccttttttggtgaaaatagaaaaagaaagcggcaaaaggcaataaaaacaaaagtgttttgatacagatttgcctatcatattgaaaaacaagaaagactaaagctaaaataaataagccaactggcaaaaaagaaaagcagtgaatacaaaaataaagcaaaacagttaaaaaggctaaatagattggtttgagaggaaaaaacctaatcaacactgactaaatcctttaacttctcaaatgttttatcgccaatccctgaaatatttttcaaatcatccactgacttaaaacctccattggcttcacggtaatcaagaatatcctgagctttcttctcaccgattccagaaatagtctgtaaatcagccaaagtggcagtattaagattaaccttaccttttaccgaagtttctttagtatttgccttatctgcctgactggttttaccttcttgagaatccctaatgacactaatattctcaccaatagctgccacataaataactgcttcgtcttgtaatttttgagccagattaacagatttgcgatcagccttttcagaaaaacctcccgctttttctattacatcattaatacgactgtcaatcggtaaagtatagacgccctcatgcttaacagctcctttaatatcaacagttattgttgatttggcagtcgtcacctgcgtcttcttttgactttctttgccagtctttgtggttacctgaagggattgttcctttaaacgagccagactatcttcctgcttattggaagaaggaaaaaagaaataaacacccagacccagtaagactacaagaccaccaactagggcaaaaacatttttcttttccttgagtttatctaaaaattcgtcaaccattttaacctccttacttctttattcgtaaaaaaaaagaagtttagtaaaaatcctaaacttcctttttaggtataaaaacttgcaagacaattggataaaacgactttaatattctttacctttgtacaattccctgttgttattttatttttttatcacgatgcttttctgggttccagacaaaactagcgaaccaagaaaagaggtaagtgaaagcaagaacaatagccaccaaaaccatagctggcaaacgataaatcaagctccaccagcttggtcgctcattatctttgaaagttgcaacttctgtatccatttggtcaaattctttttcaatacgatgagccacttcttcaatgccatcgtcattcatgcgcttaatatctgaaatatcaatgggattgccaaaagtaacatcaatacgatcatgtttaagcaagcctttgatggatcttggccccgcataggctgcaggcataattttaacttttgctgttttggcaataactgcaacgccacctttaacatcagaagaatgacgacttccacttggaaacataatcaaagaacgatcgcttttcctaagcattttaacaggataacggacagcctcagcccctgggttttcacgatcaatcggaaaagctccacacatgcgaatccaccagccgaaagcacgattgccaaataattccttcttagccataaagataaattgcttaggccgagctgcaaaagctaaaaagataggatcccatagtgtacggtgaggtgcaactaaaatataattgtcatcttcaggcaacaatgtatctcgatgatggtaatgaatattaccattagcagcccaaattaaaaaaactaacaaagagcgcaggtaggtataaaacactgtaaaatctccttttaattacaatataaccaccttattatactaaaaatttaaaatttttgatagaagcaatgctaaagataataattaatgtataatagtatataataaaaggaagatatttatttaggagttaaaatgacagttcaacaacattggaaaaaatggcaggcaaaaattttctctgcaaaaaatagacccaatctattatttagtcttttaattatcggactagttcttggagtcgttcttgtacaagcaaaatctatgcaaaagcaacataaaaatcacatcagatctagtaggatttctaagaaaaaaacaactcctaaacctaatattaaccctaataccctaaaaataggcagcaaccataacaatcaggccgaaggatatgcttattctgcggaagcagtcagacaaatgatgaacaacaagcaagcttctgctaaacaaaaattagtttttcttacctttgatgacggcgttgaccctaatatgacacctaaaattttagatgtccttgcgcaacaacacgttcatgccactttttttcttgtcggctgtaatatcactgataaagtaaaacccattttacaaagacaaattacagaagggcatgctcttggtatccatagcttttcacatgtctattcacttttatatcctaatcgagtgggtaatacacagcaaatagtcagcgaagtgactcgtacgcaaaatgctctcaaggatcaattggggcaaaattttaagacaggtgtttggcgttaccccggcggacatttatcttggacaggcttagaagcagctgacaaacaattagcagctcaaggtattcagtggatggattggaatgctgctgttggtgatgctgaacctctggctacaagacctacaacagtagcaagcatgttagcttttcttgatggcagtgctaagattgctaccaaccctaacgtacaggttgttctcatgcatgatatttctgaaaaaactgttactctcgcaagtttaccgcaaattattcgttattataaagatcgcggttatacatttgctgttttaaaataaaaaggtaactttttgcttttttatcactttttttcaattagcagaaaaaatttttctgttattctaatcgataggagctgattaatgactacttatgtttggttatttcctttactttttatctttcatgacttagaagaaatcattggcttcataccttggatagagaaaaaaagtgatcttcttaaggaaaaagcccctcttcttttaaagacgcataaggatttgacaacagagggcttcgctctggctgtttttgaggaattctgcttgattctccttatctccctagcagctttttgcagtcaaagccgatttctttatctgatttggttaggcggactaatagcctttagtttacatttgctgtttcatatcatacaagcctttatgctaagacagtatatcccagctgtgggaacggctcttttatgtctgccaatcagctctgtcattatcctaaatagttgtcattttcttcatgtcaatgtgatagaattattctgttttggtttgattggattattaattgttatcttcaatctcttgcttgctctcaggctgggtaagcaattttctaaatggttgaacagctaatttcccaactatcatcagtcttacttttttgctataataaagactatgacaaaaccaattttaaaaaagaaagaacgtgtcgatcagcttttttcaactgatgtcaaaattattcaaaataaggaagttttttcctactccattgacagcgttttactttctcgttttcccaagattcctagcagaggtctgattgttgacctttgctctggtaatggagccgttggtctttttgctgcaaccagaacgaaagctaaaattattgaagttgaattgcaggaacgactggcagacatggcgcagcgttccattcagctcaatgaccttaccaatcaagtttcgatgattagggacgatttaaaaaatttgttggaccatgttccgcgttcaaaagttgaccttatcctttgcaatcctccttatttcaaagcggcagagacttcaaagaaaaacctttctgaacattatctgcttgctcgccatgagatagcaactaatttggaggaaatctgcaaaatcagccaacaagtgctaaaaaccaatggtcgtttggctatggttcatcgtcctgaccgcttccttgaaatcattgatacttttaaaaaatacaaactggctcccaaacgccttcagtttgtttatccaaagctgggaaaagatgctaatatgttgctcatcgaagcaattaaggatggctcgcctaatgggatgaaaattttaccacctttaatcgtacataaggacaatggggattacacagataacatccacgaaatctattttggtaaaggtcatcaagcctatatgtatgtattgaaatgtgctgatgatagtctttacacaggctacacaacggatattaaaaagcgcttagctactcacaatgctggtaagggcgctaagtacacaagagcaagactgcctgtcgaattaatctatgttgaacagtttaaccataaaaacgctgctatgagtgcagaaggtaaattgaaacaaaagacacgcgctcaaaaattgcactatattgaagaacaccagcatatcaatttagtctcacaattttaaaggaacggccttaaaataatgttactactttcttcaagttggacaaaaaaattccaactgaagaaccagtattaatagggctgttcttttatttttcttaaagagtgtcaaagtctctttacaacatttctttagacagctgctattaacttactggcactaaaaatgtagggtcagataaacttctgcactactttgacattactttagcacaaatcataaagtcttatcctcacaaatctttactagattttaataatattgatatgctagtaatgttcaagtgccgataacataaataagagagtgcttggctttcccacaaaataaaacttcctgacctctaaacggagacaggaagacagagatatctttaaaacagactgaagacaaacctatttcccaacgtaaaaaatttttaagctctgcaaatttcaattttaattttccttaattgcaagcgaagcgagctctaaacgagattttccgccacgtgataaaagtctcaaaagaagactttttctacattcccatctttaaaaatgtttattttttaaatttaataaaaccaaatatgtacaaaattatcgccaaaatgataaatgagatgacacctataaaaaaatacttcatcacttattccttaccaacatgatactaaatattcaatagctccacctctagtcaaacgcttaatgacttcaagtaagaccattaaattctacaactaataaagcaatacaaactgtttgttctatcatcaacttttcttttattttctataatattcaagattatttcttttcggaatatttaaggtattaagctaaaacagtctgggagactattgaagttaaaggacgatctcgatctcaaaagaagacttttcttcaaacttttaaaaaaactctcccgaaatatgtgtttcaggagagtttgaatgatttctgtcacctttattgcgaacagtgaagccgttttacttttcggaagtaaagaaaaagaagctagcaatcaatgatttttatctgtctttatccacctgacaataccagcaaccagcaatactgttattaaaccgcaagcgataagtgctgctgtactggcaactgtcccagatatagcatcaactctatataacagtcgcataaatgaaaggactgtaagtatgatcaacaacgaggattcaattctaatcagggaagtcatttgattatcaacggttcgtaaaaaacctggaagtaacattaacgtaataataatcaaaaatagattagaaaatactccttccccattattgaaaggccaaatcattaataaattagctataacatttagagatgaacaaaaaataaacgaccatttttttgtcattatcaatacctcaaatgattgaaaatattataatcaaatcattttaatctaatgttgctgcaccataacctatcatccctcctgcagcggcacatgtaagtaaataagcacctccaagtccccatccaattggaccagatactgcacaaagccccattgttgcagcaccataggtagcgacaccgccaaggatagagtccacaccatctccagcttccatggtagaaagcagttgactatctgcaacttcaaaattgtcaaaggccattgagtctaatgttactgtgttcataaaatcctcctaaaattcacaataagcttattagcttacaagtttttttactttcacaagttttctaataaaacatgaaataattttaaaagctcccttgtgaaaactacaagtacattttaatccttaactttttcttattcaagggaatttggttcatttaataaaaaagatatttaatagtaaaaaatcagaaatctttctgaatacttttgaaatattaacttgcttatagacaaatcttttttagctctgcaaattcagaattattttccttattgcgagcgaagtgaactttaaacgagaattttcgctgtgataaaataccagaagcgttgatgcttctgctactcggaagatttgaggcttttttccaaacttttcaaaaaattctcttgaaacatatgtttcaagagaatttgaatgattatctgtcacttttattatgaacagtgaagcaaggacaacaaatacttaagtaatactgtttaatctcagtattctttacagaaaattatagtccaaaaataggggctgtgattgcaaatcctgcaaatctgccagcaagcacatcacaattacaccactacgatagcactcgtaataccaagtatcacgcctccttctgattcagaaagataagcgatatccactgccacaaagtcatcaagaaagtagtgacaaaacctccgataggagaagacttcatcactttgttaccatgtttttatttattttattcaaaataattcgtcctacaattgctgatatagcaccgatgattataagcacaatatacttcataattaatctcaatcgcctcccgttattaaataccaacttccgtttgcaacgcgccaataccgcctaaaattgcgccacctacataatcaggtactgttccaaggggcaataccacatctcctccgactgctcctgcaataccaccacctactgtacctgtccaagctccttctgcagtagcacatgtaagtagataaataccgctaataatgccaccgttaataacacctgttgcttttgctttttctaatgtaaaatgccgtaaatacaaaggccgacaaaaagaaaaaagcaaataaaagagacaataatgtgtttactgcggtaagaaataactgctagagcacagagcaccagcattaatagaaatccagaaaatctttccatgacattatccttccttttctaagtctgctttatttaataaaatagtataaccattacaataaggcggagcgaagttaatcaaaaaacgatatatcaccagaagccaccgtctccccaaccatttttagcaccagcataggcacctgaaacgataccgattgcttcagtccctaaggctaagtagggtcctactgccggaatattccatagccacgtagcaggtctataagcagcggtagcccctgtacaagctcccacaaatccttcagcaacagccgagacaaaaccctcaccttctacagcagctaaacaatctgtgtccgccacttcaaaactatcaaaggccattgaatctaatgttactgtgttcataaaatcctcctaaaattcacgataagcttattagcttacaagtttttttactttcacaagttttctaataaaacataaaataattttaaaaactcccttgcgaaaacgacaagtacattttaatccttaattttttcttactcaagggaatttgattcatttaatgaaaaagatatttaacaataaaaattcagaaatctttctgaatacttttgaaatattaacttgcttatagacaaatcttttttagctctgcaaattcagaattattttccttattgcgagcgaaacgagctttaattaagacttctcaccgttgtgatacatctgaaacttcaatatttctgctacacgaaagaagataggatccctaaatttctgaaatcatctattggcgacgactcaaacagtctaaaggacactttaaagttgaagggaaagtcttaaaataagctttttcttcaaacttttcaaaaaattctcttgaaacatatgtttcaagagaatttgaatggttatctgtcacctttattgcgaatggtaaagccgcttttcttttcgctggaagtacggtgaggacgtttattgctcttattttcaaaatctttgcgatttttgttagaagtccgtttaaattcacgacggccaccgtcacgataattacggcgactgtcgcgacctccccgacgatcctcacgacgacgattgccgccctttcctttgccagcaaatttaaatggcaagggtttttcgcgagcaatttcaaccttaggcagcatttctggatcttgaacagttagagtcaagatatattgtgctaattcttctggtgaaaattcagcagctaatttttcagcatctttggtaaacttatcaaaattagaacgaatcttttcatcagcaaagtcacgctcaatctttttgagggccacttttttgcttgcttgaaaggcttcttgcgctgtagcgggtttcatgcctttcatgcgttttttagtgagcttttcaataatttgaagatagcccatttcattgggagccacaaaagtgattgactgaccgtgcttaccagcacgacctgtacgaccaatgcgatgaacataactttcagggtcttgcggaatatcatagttataaacatgagtgacgcccgaaatatcgagaccacgagccgccacatctgtcgcgaccaaaatgtcaaggttatcatttttaaaatcccgaagaacacgcagacgtttcccttgatcgagatccccatggatcccttccgcacgatagccacgcagttttaatcctcttgttaactcatcaacacggcgcttagtacggccaaaaacgatagaaagttctggctgttccacatccataagacgggtcatcgtatcaaatttttcattttccttgacacggatataatattgatccaccaaatctgttgttaattctttggcagcaatcttaacatgttctggttctttcatgaactttacgccaatacgtttgatggcatctggcatggttgctgaaaagagcaaggtttggcgtgtttctggtacacgtgaaataatggcttcaatatcttctaaaaagcccatgttgagcatttcatctgcttcatccaaaataagggtttccacatgatttaatttaagcgccttgcgtttaatcaaatcaagcagacgtcccggtgtcccaacaacaatatgggctcctgatttaagagccttaatttgtttttcaatgcttgaaccaccataaaccgaacgaactttaactttcttttcacgcccaaaacgaaagagctcctcttgactttgaacagccaattctcgcgttggcgcaataacaagggcttgaacaacgttattggtcacgtcaatcttattcagggttggcagaccaaaggctgctgtttttcctgtcccagtttgtgcttgaccaataacatcttttccttcaagggcaagaggaatagtcaattcttggataggtgatggctcaacaaagccgacttttgcaacagcagaaagaatgtcttccgccaaatgtaattctgtaaatttcaatgttttctctttctaaaaggcagtgcgaagctaccttatcaaacgttagtaatgtgcaactaaaatattatagcattttttctttaagaaagatagttaaaaactcacactaaatgatcgttttcaaaaattggttaatgatattcctatttaagcataactgtttttttaatagaacaaagataggctagttatttctcttttaattaatcaaaaaatgagataaaagctcaatctgtgatttatcgcttctatctcactttttaattctaatgtaatgtctatgctgtcaatctttcttagcctttaaaccaagcaaactaaaactagtaactaagccaataataccaagtaaaggcatataagcattgtttgttactcccgtatttggtaatgtttcttgaacagagcttggttgataagcagttgattgaggtttgtagttaattacagttgaagtccgcggtgatgatggatcttgcggatcagtagggtctgcaggatcctcaggagtagttgttttcactgtatttgaactgtaagttaccccattgacagtattaatataggtattttcaaaagtaccaaccgcaatacgtttcatttggatataactttcagcttggaaggctgaatcaattgaaacagaacgcagaaaggcttccttgaacttaattgtgatagcacctttagtggtatcaacttccgctgtcgtatactgagttaactcagtacctgacttgataataacaccgtttttaagagtgatatcaaccttggcaaaaactttatactgaccagtatagtgatctcctgtttgatcataatcatcatagaaattgtattcaaagagttcttctgagtgatttgcagggataatgccaccaatcaaacggtaattaaagactgtattaagtggaatagtctgaccatcaacattatttgtatcagccggatcaagtgttaaggtcacatctttcttagggttaatcttaggaacattattgataacgatatttgatgcataaccattaccaaagtcaatttggtaagcttgattttcataactgccgcctgtttgtcccatttgttttttaacaaccattggtgatacaatcttcaaatcaattccagttttgacataagtatcataaaattctcttggattatcggcacggaaaatttggaaagcacctttaggtctaattcctgccttagaaagaacatctctaatttcttgaggggctgcttcaagattagtataattatccacactaacaccagtaacttcattaccattagcatctgtaatcttcactaaatcctgacgcaattcaagcgcttcttctggataatcatctacatagtaaaatcctttttgaatggtatctgctgaagagcggtcgtttttatattgatccaaatcccaagttagctcataataattcgttgaaccggcaagaactgttttaccatcaataacaacgccattttcgtttttattaaccttagttggtttaatataattattatttggattatctggatcatttggtttaccaggagttgtcacccgaacaacattggatttaatgccataagcatcattgactgtgagcgtgaaattattcttataagttgcgccatcattaagaacttgtccgaccactgttggataaatcgttgccactgacttagtcaaatcagcattaaacgtagccaaagttgctgcagttgccttgaaggtgactgtattagttgcattatcataagtgacatcaaagccagggcttgcagcttttgtagcttcaggattaaattgataaccagatggcaggggatctaccaagacaaaggaagttgtttcatcacgtccagcagggagatctgctgtcttcagctggaacttaacaacagattgtttagccaccaaagttctgtcaatattaatatcgttattgtttctaatttctttgttaacctgcggctgaacagctagtttaaagtaatggaaatgaacagttggtacagatggaggtgttggaagatcttgataaacaggatcagtcggcggtgttggaataacctcataagttggctcaacaggtttgtttggttctggttgatctggtgttggtgtcggtggcgttggctctgcttcatagcttggctcaacaggtgctggctccaacggcttttctgtttcataggtcggcggtgtgggtttatttggctctgcctgatccggtgtccttgtcggcggtgttggctctgcttcatagcttggctcaacaggtgctggctccaacggcttttctgtttcataggtcggcggtgtgggtttgtttggctctgcttgatccggtgtccttgtcggcggtgttggctccttttcataatttggagctactggtgccggttttaatggcttttctgtttcataagttggtttagttggagctgttggtttaaccggaggtgtgggtttttccttagtaactttaggaacattaaccgcacggattttaccatttaaagaataccaaatatttggttttttgccatcagtattgtccttaccaggaacaacaggcatgtcagaaactggcattacatttgttgcagaagttgctcctacagtaacatggttattcggaccagacattttaatagcccctgctccataccaagaattcggcgcatctgaactatcccatcctgaaccagcttgactatttttatacatagtccagcgagagccaccttcaccctgtttaaagttaagagtatctgtagcataaatcatgccattcttttcaccaatagatgaaccagagattttgacaaatttaccactataatctttagccatctcaatagagttatgttcacggttaagagaagctactgagagaagggcattatcaaaattaattggttttccatcttcgtcatagaaagtgaattcatttttaataaaaatagaagtgtttttttcaacttgacctgtataagcagaagcaaaaacacctaaagttggatcggtaaaaatacctaaccaaaccttttgaccttgaaacttggacttagggtccactgtatacttgtagacaattttagaaatctttttaccattgtaataagaattctgcaggttagtgtatgtagctgttgcgctttgaccgcgctctaaaagtaccgatccccatttaacctatgagttattgcttactgtcgttgaccagccagctttatcaccaaaattcccataaagctccatagaagaagcaacatcattagattgttctaagttagtgatatctagatcatctaattgaagaattttttggtcatattttgcttttgaagtgcttttgctaaaagcatcatccacagcagaagccttaaggaacttcccatctgttgtcaaagataagttcgcatttggctcaagatcatagaccaaattttgagcagatggttctgttaagtttccgtcttcatttttatgtttttcaagttctgccagtgcagctttaatagaagtttgttcatcttcgtatgcctttaacttaactggatagtctgctaaatctttttgatatttggcaagatctgcttgatacttagcaagttttgcttcgtaatcagctttagcatccgcattgcgcttcttaattgcagtattttcagctgtgagcgctgcatttgcggcattatttgctgctacagctgcttcataggccgctttagcatccgcattggctttttgaacgcgagcgagctctgtttgataggcggtcaatttagcttgatagtctgcttcgtttgcggcattagcttttttcaccgctgccaaatcggcctcatattgcttgagtgcagcttcataagtcgccttagcattctcattgcgttgcttaattgcagtattttcagctgtgagtgccgcatttttggcattatttgctgctacagctgcttcataggtcgctttagcatccgcattggctttttgaacacgagcaagctctgtttgataggcggtcaatttagcttgatagtctgcttcgtttgcggcattagcttcctgaacacgctttagttcagcttgatattgagctaacttagtctcatattcagctttggccgttgcattgcgttttctaatttcttcattggcagcggcaatttctgtatttttggcattatttgctgctacagcagtatcataagcggctttggcggctgcattagcttcctgaacacgtttcagttcagcctgataagcagcaagggctttttgataggctgcttgattggcagcattggttttttgaacggctgctaaatctgcttgatattgagccaatttagcttcataagctgttttactggcagcatttgcagcattaatgcgttcaacctcggctttatgagctgccatatctttttcatactgttctttagttgcctgatttttagctttgattttagcaacttctgcctcatgagcagctacatccgatttatattgatctgttgtcttcttaatatcctcagcttgttttgtgtaatcttctttaatttcagtttctttttggactgcttcttcagctgttttaacagttcctttattaacatcggcatcttggacaacattgacaccagcagacttagcatcttttgctgcttgatcaagatcagttttaggtacttcaactggtattgaaccatttgtctctccagcttggttttgactttgttcagcttccttactcgcactcccttgagcctctggcaaattggtcgctggatttccagtttgtgttccaactactttagtatctacatcactagtagtggtcgtttcatcggcaaaaaccttttgtcctgctacagagactgctgctactgttcctagaacagcaccacacagtgttttactaattttacttttacgaaaaccgtaagtttttttgactttcataaatcctccaaatctgaataaatcttccaaatatatttttgtaatatacgttaaaaattgtaatataattgatttgatttgtcaaattttttgcttgaaataaaaactaatgtctgaatcaaattataaacacattcaatcgctgctatttttcgagcacaaactccacactttatccaacattaattctaaagcacaaaaaagtcaggattttgtcatcctaaccttttttacttcaatcaatgataatataacgacgaataccactgtaggaacgatagctaatccattgatgtccatcagcattcaagatactgtcatagtaaatactttctcctttattaaaggtaaactgagttggactagatgttctggcctcatttttaacctcaactttattagtgaaaacataagttccttgtgctggaagattgactctattaggggcttctactgtcgttgtctttcctccaacaacctttaattcaccagttacaaggcgataataaaggtgaatgtcatagttaccactgtcatttttatggtcactgaccttaacggtcaccttataaacaccttcgccttgtttagttgcttgataccaaataatatcgtcctgtccgttttgttctgaccaaaccggcactaaaacctcttttatgccttgagtgctggaagcattagtaatcaaaacatcaaatccttggctgctcttattggcaatgctaatgatacctgttgtttctacaggcttcggtgcttccacctcagttgtctttcctccaacaactcttaattcaccagttgaaaggcgataataaaggtgaatgttataattaccactgttatttttatggtcactgaccttaacggtcaccttataaacgccttcgccttgtttagttgcttgataccagacaatgtcatcctgcccgttttgctctgaccaaactggcactaatacctcttttatgccttgagtgctggaagcattagtaatcaaaacatcaaatccttggctgctcttattggcaatgctaatgatacctgttgtttctacaggcttcggtgcttccacctcagtcattgttgccccgactcctctttgttcaccattatccaaaagataataaagatggacatgatagttaccgctattatttttatggtcactgaccttaacggtcaccttataaacgccttcgccttgtttagttgcttgataccaaataatatcgtcctgcccgttttgctctgaccaaactggcactaatacctcttttatgccttgagtgctggaagcattagaaatgacaacatcgaattgttgagccgttttattttggatgacaatagtacctgacactttagtttcaattggagagggttgtgtcgtaagctttccaataacaacataacgacggataccactgtaggacacatagctaatccattgatgcccatccgcttctaaaaccttatcataaaaaacgtgatctccgttgtaaaacgagaattgggtcggactagacagtttagcttcatttttaacgtctgcttgtttagtaaagtgataggttccttgtgccggtaaattttgctgaacaatttctttttgcttcaattcttcaattgtcacagcaataggagcatagcgacgaataccactgtaagacacatagctaatccattgatgcccatccgcttctaaaaccttatcataaaaaaccttatctcctttatcaaagttaaattgggttgggctggacatactggctgcattttttacaggagttgtttcttggaaaacataattgccttgcgatggaattgagacagccttagcttgtctttgcataagattttctgctaccgctttctcattttgttctgcctcagtctccttagctggagccgaggtgaccattttattttcgtctttttcacttgagtcagtttcaacattgacttgtggatttgaatttttagtatcagtagcagttactgcagaagcttccacttcacttgctgtctttgaaacagtagggttcacatcttctttggattttgcacctttgtcatcgacatttaaagcaggagcatttaccttattttctttctcctcaacttcaacttggggtgtttctgttagagttgtttgagctgctgccttatctgcaactgcttggctgatagcaactgaattttcagccacgttcacaactgcgttttcacttgctggcaattgagttccctgctcttgtgcagaaacattttgggtacctagaaaaaagacacagccaattaaaacagatgcagctccaaatgcatatttgcgaatagaaaaacgttgtgcttgatgattaatatcaattcttttcataaatttcacactcctatcattatgatatactgcctttgaaaatcaatgagcaccgaacatgtaaaatgacgaaatggcgactattttttgattcataatcttccttcattttcttttttcacctatattgtaacacaaaagaaatatttagcaatacttacgtaatatattttttgaaaaatttttactatataaaaaaacaccaaaccaagaaatggttgatgcttatttataagatttaaacaaatcattgttacatcttctcttccaaaactatatctggatatttatctgcaaaccaatgaagagaaaagtcattttcaaagaggaaaacgggcttgttaaagcggtctttagccaatatattgcggctggaagacatacgttcatcaagatcttcctccttaatccaacgcaccgttttcttacccatgggtgtcatgataacctccgcattgtattcattttccatgcggtgtttgaaaacttcaaactggagctgaccgactgctccaagcatatattcaccagtttgatagttggtataaagctgtatagcaccttcttgcaccaattgctcaatgcctttatgaaaagacttctgcttcataacatttttagcagaaactttcataaagagctctggtgtaaaggtcggcagtggctcaaattcaaatttatttttaccaacagttagggtatcaccaacctgataagttcctgtatcgtaaactccgataatatcaccagcgacagcattttctacattctcacgagattctgccataaactgagtgacgtttgacagcttaacgctcttaccagtgcgggcaaggttgacagacatgccgcgttcaaattcacctgagacaatccgcacaaaggcaatacgatctcggtggcgaggatccatattagcttggattttaaaaacaaagcctgaaaagtctttatctaaaggatcaatcaccttatcgtcagtggtcttgtgaccgtgtggttctggtgcaaatgctaagaaagaatccaagaaagtttgaacaccaaagttggttagggctgagccaaagaagacaggcgtcagctcaccctttaaaatggcttcttctgaaaattcatttcccgcttcagtcaaaagttcaatatcttctttagcttgttcatagaagggattattagcaaagagcttgtcaccatcttcaatagaagcaaaacgctcatcacctttgtagagttcaagacgctgattgtacaaatcatagagcccctcaaaagatcttcccataccaataggccaattcataggataagaagcaatccccaatacctcttctaattcttccaataaatccagcggttcgcgaccatcacggtccaatttattgataaaagtaaagatagggataccacgatgcttgacaacttcaaaaagcttttttgtctgtgcttcgatccccttggcagagtccacgaccataacagcagcatctaccgccattagtgttcggtaagtatcctcagaaaagtcctcatgcccaggtgtatcaaggatattgacccgcttacccgcatagtcaaactgcatgacagatgaagttacggaaatcccacgctgtttttcaatatccatccagtcagatttggcaaaattaccggttttctttcctttaacagtaccagcctctcggatttcacctccaaaatagagcaactgctccgtaatcgtcgtcttaccagcatccgggtgggaaatgatggcaaaggttcgacgtttcttaatttcttcttgtaagttcatcttatttccttttctttttttatgattaatagcagagcttctaaagttattcatactaaaattcatttttggtatgcaaaaagaactgcatacacagctcttttattataatagaaaataagggggaattcaaataaggaaaaagcccgtattgcttcctttaggcttttttaaaatgtcaccttatctttctgctcttgcttttccatattccctcctgataaatacccaatcaattagcagcaacatggcagttaaaataaaggttacagctagatagcgcactaggagtggcgtattggtaataaaaggtgtgtaacgcaagatcccataattgccgccggtcaaataattaataatcaccaaaaagaggtttaaaacaaacgtgtagagaataatagctttccaactgagaaaatttgacttataataacgcataaggtaaataatacttccaaccaaaagagcatagtgtccaatgagaaatgaaaaagcagtaatatgtggaaaagtataagcatccataatagggtaaccaatagcaaaaatagcaccactaactcccataagtgcaaaatactgcttcaatttcgttttatccggtagcaataaaagggcaaacatagcaagacgacaatgataaaacggcaaactattggaaattggaatcattttcgccccataccaaatatagagtgaaagtaactgaaagctctgtaaaaaatgataaatacaccacaaccactgcttccgataataagtaacagataaccaaatgagacctagcaaaactacaaacatcagcaaataaagcggtattgaaatggatggtgggcttgtctgaacagttgtaaaaaaatcggtcataaatctccttcagaatagttaaataagtgatatggcaatggtcagaactaagaaactaattatttgaaaataaaactcgcttaatttcttctaattcagaaatagtattattaaaagtcagtttctcccaatcactttgacatttactttcgaatgtgcttttacttgttaaatagtcactttctttattaaaaaatttataagcaacggcttgagtagcatacttccaataatcatcctcatcgtcattatttttaataatttttaataattctttataggtcttctgagcttcaagtttagcatagcaaactttctcttcatcttttgaataattaaaagcttccaaaagtaaacaattgatataattttccccaggatagtagtcatttgtcacaatatatgcttttttagaaaaagcgatcgcccttcttaaataatctggatttttattaacacgatataaatttttatagattgctgcagcaatacttaaactttcaacctctagggttttatctagtggaagtttgttaatgatttctaaagcttccattaacgcatctgtctgagttggttctttagacttataagtcgccaaagccaattgctgaacgaaataaatctcatctggagatttttgagataactgtttccaatattttttggcttgcttaaaatcattatctagcattgcttgctttgcagatttaattaaatttccaatgatttttgtattttttgtagctttcacagcattatattgatattcctgatcataggaaggtggggttaccttaggaagataggtgtaaaatggactgtctattttttcttcttcgggcttgtttaacaatgcttcctcaacatatttcttcaatttatttcttattggaaaactttcatcagattctaatttttcaccaaaattattgtatgtaagaattctcgtatgatttaaatcaaagccaaactccctttctcttttttgacacataataattgttgaaaaaggtcgaagtgcatgacgaactccaagctcataaagtgcattggcattatcagttgtaatatctgcaataacaagttcggcttttaacaataaattgtacatatttttgtcaataacattagagccaactaactcatccgctcgaattaattcaaaattcggaaattcctcataaaataaaggctggataactttttcatatgtttcatctaaattaatatttcttccagtgtagggatctgtcttcttcccaaatcccataacaacaaaacaatactttttaccattcactgttaactcctcctatctaaaaatttcaacagtcccagattcagcatagatatttctgaaattaagattcccgtatttttttcgctcaaaagaggtaatttgtttaggaacaaaggtaactgtcatcccttcttcaattttatctggaagattagaattttcatttcttaaatacagttgcagccaatgtttctcacctttatgaaattcttcacctgtaggtaacaaagtgtctaattctaaaaaaatattatcatgtactctattattaacttttgtaattttagcagtgtattgcttaccaataacagaaattttatgtaatttatcacagcatctttctacttcactctcaattctctcctcttcacaaattccaatatattctttaatgatttctcttacaaaatttttcaaatcatttttacaacgactatcgccattcagataaattccctttacatttttatccaaacaactatccaaatattcttgttgtctttgattaaatcctggcagaaagaatataaaataattattctttttcacccaagttgctcccatctcattcaaacaaacaacactcgaaaaatattctggagataataaaaataaaacaattggctttgaactaagtcccttttgcaaaaaatcataaatattgtttccaacaggtatgccatttgtagagcttgaagtataaattaattgatggttctgcaaaccaacaccaattaacaatgcttttataatgtcaccataattactattttttgaattatgacttataaaaattaatggcagagtttcttcgtgattaaacaatttactccaaaaaaccttattcatttttagtcccccactaaatatttaaaataaatgttatcagatttttcaaaatttttctactttttcaaaaaatagttctgaacattcaattcagaactataaaattttacccttccaaacactccacaacttgggccaatttcatggaatttgatccctttagaagtatttggtcattagggcctaataccttttgaatttgctcagtgagctcatctacctgatcaacttgggcaaaataataccatttccctactgaataaacttgggcgacttcatctgctagagcttgcattagtggtccaaaaagaaaaatacgatctatcactgcaggatctagactagcaatcatggctgcatgtaaggctaattcactgtctcctaattctttcatatctgccagcaccgcaatttttttaccaccattatttgctggaatgctggagaaagtctccaaaatcagtttcatagctgttggattagcattataaacatcagataagatatctgcaccgttagccgctttttcccattccgttcgattacgagttagattgagctgagccagtgcagagataatcttttcttcagagacattaagcagttttccaacatagctagcaatcatagcattagtagcattatatttaccagttactggcaatttaatctcattatctaggaaattcgttttaaagttcaaatagtttttatgctcttctaattcggtcacaaaaatatcttcatcagctccaaagcgaataaccttttgcttttctggtaaaaatgaattaatgattttatccgctggtgcaataagaatcccatgaccatccattccttgagtaatttgcatttttccttcagcaattttctcacggctgccaaagaactctaaatgagcttcaccaatcaaggtgacaacagctatgtgaggatgggtaagattagacagaaaggcaatatcaccgagatggtcctgacccatttcaagtacaattttttcagtatcatcaggcatgtgtaaaactgtataaggcagaccgatttcattattataattaccttgtgtcttgtaagtcttgtaagtagttgctaaaatagttgctatcatgtcctttgtggttgtttttccattagagcctgttacagcaataacatcaacccgcattttctccaaatagtattgcgccaaatcctgaaaagctttcaagcaatctacaactaaaatatagggataatcactggttatgtttttttcggaaaaagtagcaacagcaccattggcaaaagcagtatcaataaactcatggccatcacgcgcaccctgcaaaggtaaaaataaatcacctgtctttatctggcggctgtcaaattcaatagcattgatggtaagatcttcaaaaagactgacatcattttgagcacctacaaccgaggctatctcttgtaaagttaacttcattttgcttctcctaaaaaataaaaagagcttttcgctcttttattataacataaacaaattagagattctcagcggatttactttctttctgttaaatgagattgtgaatgatttttccaccaagatgatagaatggaaccagaaatattatgccaaatagaaaaaatagttgaaggaatagctgcttgcggaacaaaatatttcatggcaagtgttgcccccaaactagaatcttgcataccaacctcaaaagtaatagctttttgctgtggttcttctaaatgcaataatttggcaaaagcataccccagactatagccgcacaggttatgaagcataacaaccggaatcactaaggctgtagctgctgtgaaaatattggcgtgattagctgaaacaacagcaccaataatcaaaagaatagcgacctgtgagatcaagggcattagtttaatgacagcagcgattttcttgccaaaaaaggtatgaatcagcacccctaaaataatgggaacaacaacaattcgtaaagtagataaaaagaggctgagcgctggcactgcaatatattgtccagccaaaacagataagagcaaaggcagcattacaggtgccaacaaggttgataaaatttcaatagatacatccaaagccacatcaccaccagacagaaaagccataacactagacgatgtgccactaggacaagaaccaactaaaatgactcctgctgctgttgcacccttcaaatgaaaaatcaagcagagcagccaagccaagctcggcataataacatagtgagcgactgtccccaaagcaacgggcactggacgtttggagattcttacaaaatcttcagtagtcaaagtcagccccattccgaacaaaataatacctaacaagtaagacgtattgggaataacccagctactagttgtgggcaaaaagtaattaaaaacagcccagataacgacaacaagtgtaaaccatttactaagtttttttgaaaattgagttaaactttccatcattgcctcctaaaataataaaaagagatatctactaaccaaagtcaaaagactaagagagaaaataagatcttcatcttttaaacttcattatacgcttaatttttgaattttcaatatattttcaaaaattatttcctgaattttcaaaacttttctagcaatcattaaaatttgtggtaaaataaaagagcaaagcctgctttgcacagagtagatgattcgcgttaagtgtgtgtgaatgggatgtcgtcacacaacgaagccataagcgcggtgaatcattgcatccgctgttctcaagctctaccagcttgattaaacagctccattttacattaaggagccaaaaatgaatactatgtttaaatcacctaagcttagtccgcagcgcttggtcactctggccatgttgattgccttagcttttgctattggaaaattttccattcccattattccccaacaattgattatcagcccaactttcattgttaatgtgatgattggtatgattggcggaccaatctgggccttcatcagtttagctattttggacatagtggacaacctatccagtggtgcaggtaactttattatctggtggacactgctagaagccgttcaaggattattttatggacttttcttttatcaaaaatcactgagctggacaaataaaaaagactggctacacgttactattgctacagcaatcattatgcttatcggaagctttatcttcactcccttgctcgtccagatttactatggtgtcccattttgggcacaatttgcagcagggcgttggttaaaaatctttgaaatccctattcgaatcctagtcactatggcaattatgcctcagttgcagcggattccagaattacgaaaacttgcaaattttaaatagtcaatcagagagacatccctctctgattttttgtagcccataagcaacattttcaggcaataaaaatcaaatatagacaaatttacgctttgcaaaaagcaagaaaaaagaccctagcctcatatctattcttcttaaggaacaagacatgaaacaagagctttattatctttaaaccaaatggctttcgcgtttgtcaaacatttctttagcaagactaactaattcttcaatcaaaactgaataagacagccccatattttcccaaagaagaggatacatagaccactgagtaaagccgggcatagtgttgagttcattcaaataaactttcccatcctctgttaggaagaaatcacagcgagaaagtccacagcagcccaaagttcggaaagctgttgcagcataatcccgcattttttcaacgataacaggatctatttctgccggaatagccatggtgatcttattatcaatatacttggcttcgtaatcataaaaagccacatctttgacaatctctcccggtaaagttgttttaacatcagtatttcctaaaataccaacctcaatctcacgcgcatccacaccttgttcaattaaaacacgactgtcatacttcaaagcaagtgcaatagcttgttttaagtcagtgcgattttctgctttagaaataccaacactagaacccatattagctggcttaacaaatacaggataaatcaatttctcttcaacttctgccaacttgctttctaaaggctcgccttcaataagagcaacataagctacttgaggaatagtagtcgcactttctaaaacttgctttgttgtaatcttatccatagctacactagatgacagaatattggttcccacataaggcatttttaaaacttcaagaaagccctgaatagaaccatcctctcccataggcccatgaagaacaggaaaaacaactgcttcttcctcataaatatcacttggcttaattttttgagaagcaataatcgtgtcatttgtcatcagtttatcagtttctgatggttgactatcaaattcttgcgtcttaataaagtcacccgcttgcgtaatgaaataagttttgactaaaaagttgtcataatttatggctcgcatgacactctcagctgagagcacagaaacatcgcgttctgcagaacggccaccatataataaaacaagcgtttctttagacataagattccttttctattctaataattcttaataatcatatcacaaataggaagcattttcaaaaaatattggaaagatatgctgcagactagagtttacaagaaatatcatgctttcccaattcaacgaaaaaaccaattggaaatatcggccaattggttttttatagaaaaagaaataccaaaaagaagaggtatgcaatgccactcctttataactctgtcctgttttcaattgctcgaagcagagttacttcatcagcatactcaatgtcagaaccaacagcaagcccacgcgctaaacgtgtaactgtaataccagcaggtttgagaactctggaaatatacatagccgttgcttctccatctgctgtggcattagttgcgataatgacttcatgaatatcactattatcacgtaggcgtgtcagaagacttttcaaattaatatcatcaggaccaataccattcataggagaaatcaggccgtgtaaaacatgataaagaccatgatattcctgaattttttccattgcagaaacatccttactatcttcaactactaaaacagtcgagcggtctctgctttcatctgtacaaatattgcaaggatcatcatctgtcagattgccacaaacaaaacagtaggtcaattctcgtttagcagctagaagatttttagcaaagttattaacgtcttcatcactcataccaatcgtataaaaagctaagcgagtcgctgttttgataccaatacccggtaattttgtgaaactctcaataagtttggcaataggcgttgggtagagcattctttttcctcactgattcattggatacatcttttgataaagattgatgatatctctcgtaatagcatgactagtggttccatgaaggtctgtctcatgtggcaagacaacagctacagcaatttgaggattgctgcttggtgcataagcaacaacgtttaaattggatgtataaacagatttaccatcatctcctgtcacgtaagcttcggctgtccctgtttttgccgaaataggaacacttgcaccttttgcaagagtcttccctgttgcataactaccaccgttaacaacattatagaaaccttccttgataatccccatgtcatcgctagagatagaaacattatttaaaaccttggtgtcaatagattgaacaagatttcctaaaccgcctgttttattattatcatagataccttcaaccaaatggggagcaatacgtttgccaccatttgcgacagctgcagcatattgtgccagctgcatagccgtatagttatcaaactgcccaaatgattctgttaaaacattagaaggatcataatgttctggcgtatagccctttgactctcccggaaggtcaattcctgttgagacacccaaaccatattgagcataagtagctcttaatttctccatagcttccttatagccatctgttgataaggtcataccactatgataatcttgtcccattaattttaaagccaattgaaccatataagtattagaagaatactctaaggattgacttgctgtaagaggagttaaaccattggtaaaccaagagttaatagggcttgaacccgcaaattgaataggctggtcattgagtacttgattgcctgataagacaccgttttcccaaccagctgtcaaagtcgctcctttaacaacggaacccggagtaaagacttcagtaaccgctccaagagcattagaagatacttcgcccgttttaaggtcgtgttccaaaccagccatagaaagaactgcacctgtgttcgggttaagaacaacagcataaacgccttcagaatacttggtatttccagatgctaattcagaattaaaatattggttaagaatttgttcaacacccttttgaaattcaagatcaagggtcaacttaagattttttcctttagtccctttggcagtggtcttatcactgataattttaccttctttgttaaccttgattgcttgaacagtacgactaccttgcaaatcgttttcatattgcttttcaagataagatgttccaacgcggtcattcagagaataaccttttttaacatagttattggcttcttcagcaggcagaccggttttttgactggaaactttaccgataatagaagtaatggaatttttatctgttttacgttcccagtcagtcttaacagagattccctttaaatctgatttgcttgtagccaatactgcaatttgctcagctgttaaatctcctgttgttaacgaagctgtattaaaaacagaggttgcattcatctggctgaaaatatgaatgatttttttctcatcttcagaataatcaatagcactgtttggaactgctttaacagcatttgcatagatcttcgattccgttaggttatttccaaagttatcatattttttattatttggtaattttttaacgattttttgataattttttggatctgccagatagtaatcttttttctgacgtttggttaccttagattcagttaaagtcaccatatctgctaacttttttgcatttgctttaatatccttggcagtcatggtattgcttcttgtaaaggcaacaacctctttaacctcgttttcaactaaagccacccctttagcgtcataaatttgtccgcgagggctggaggtttttatagtatatgttgttgactctgtcaatttagatttgtaaaactttgcatcataaagctgcatctgagctaacctcaaaagcaaaacagtaaacaaagcgacaatcaaaaaaaataggagattaattctatttgaaattaaggtaaacgttttagattgaccctttttagatttatttttttgggataccatttttcctcctatttatgaaactacgtcttttattttatcacaatttaaacaaaaacttgtgatattttcgttaaatctgtgcaaaaattaacaaaatgttatgaaaacaagaaaaaagaggtcgggataacaaaatcctaacctctcaaatcactattatcaaagaagaaaatcagcccttaatctttaattttccccatttcttctataatcaaacaataagacttttaaacaattattattctcttatttaccaagatagtattcagcagtgacatttaaattttcgtcaaattcaaaaactaatggtgggaagtttggaatttcaacacccataatgtcatcatctgacaattgtttgatatgttttacaagagcacggatagagttaccatgtgctccaacaaatacattttttccatctttaagagctggagcaattttatcttcccagtatggaagagcacgttctaaggtgacttttaagttttctgcatctggaataacagtatcatcaagatttgcataacgacggtcagtgtgtgctgagtatggatcgtctttggccatagctggcggcaatacatcatatgagcgacgccaaatgtgaacttgttcgtctccaaatttttcagcagcttcagctttatttttaccagtcaagccaccatagtgacgttcattcaaacgccatgacttttcaactggtacccaaagttgatcagaatattcaagcgccaaattagttgtcttgattgcacgtgtcaaaactgatgtgaaagcaaggtcaaatttgatgtctgcttctttaatgagtttgccggcatcaattgcttgttgcgttccttcttctgaaaggtcaacatcagcccagccagtaaaaaggttagccttgttccattctgattcaccatgacgagcaaatactaattttaccattaaaattctccttttattcttgacgacaggtcaaatagtttactgttttattttacaaaaatatcatgaaaaaatctactaaattttctaaaaagattgaaatctcttagataaaggagttaatcattcaaatcaacaagaaaaggaaaggcaattgagcttgcggttgaccttatctagtgttacaatagaaaaaattcattattttggaggttccatggtttcaactcatacaacaattggctcttttgactttgataattgtctcatgaatgctgcaggggtttattgcatgacacgtgaagaattagcagctattgatcattcggaagcaggttcttttgttaccaagactggtacgctagaagaacgtgcaggaaaccctcaaccccgctatgctgacacaaaattaggctctattaattcaatgggcctgcctaatctaggtattaactattatttagactatgtcacagaattgcaaaaacagcccgatagcaaaaatcactttttatccctagttggcatgtcgccagaagaaacccataccattcttaagatggttgaagccagcaaatatcaaggtttggtggaactcaatctttcctgtccaaatgttcccggtaaaccacaaatcgcctatgattttgaaacaacggaccaaatcctttcagaagttttcacttacttcactaaaccactaggtatcaagttaccaccttattttgacattgtacactttgatcaagcagctgctattttcaataaataccctctgacatttgttaattgtattaattctattggaaacggcttagttattgaagatgaaacggtcgtcattaaaccaaaaaatggctttggaggcattggtggcgattacgtcaaaccaacagcgctagccaatgttcatgctttttacaagcgcctcaacccttccatccaaattatcggaaccggcggtgtcaaaacaggtcgcgatgctttcgaacatattctctgtggcgccagcatggttcaaatcgggacagctcttcatcaagaaggtcctcaaattttcaaacgtattactaaagagttaaaagccatcatgacggaaaaaggttatgaaaccttggaagactttcgtggtaagctgaatgctatggcttaaagaaatctttttatttctgtataccaaaagacctgactgagaatctcctcagtcaggtctttttaaaaatcaaaaccatctttttgatcttccttgcgatcatactcctcaatttcttttggagtcatcggctttggcttcattattttacttacccaaataatactaatgattttaacaatagaaaacactattaaaacaatgataataaatttcatttaatgactcacctcctatttcccatatgataagttttctctctagataatcaataagcaaattaatcggcttttttagttttcttgctttgacagtctggacaaataccataaatcaaaagctgtgctctcgtaatcacataatttgtctgcttatatgcttcttgcttgatatgagaaatatcagtgtctacaaaatcagtaatcttaccacaagactcacaaacaacatgcaaatgctgatgccccataaaatcaaaataagctgtattatcattgcttagctttaattcaacaacaaagccttcatcaatcaggactttcaaattattatagaccgttgctaaactcatacttggatactgaggaagaagatccttatgaatttgttctgcactcggatgacggcgggagttaatcatataagaaataacagcttctcgtgttttagtaatacgaatatgcttttcttttaaatgcgttaatacatgatcataaacatccttattcggatcattattatgagaatgcagtcccatttttgactccttcgttattctttttttctattatacactatttttaaagatacagaaaaattagtgcctagcatcatcaagtagcctttacttttcctaaatgataaaaaatatgcaaaaaactgtctatcaattttatctctaaaaatcattcaaacaatctctaggataattaatacaaagatgtttaaaattgacaaaagaaagaaatatactataattaattaaaccgctagtttaattaattataggaggatctcttatggcgagacgaaaaaaggaacctgctcgtattcatcgtaaaaatatttcagatgctgctaacacactctttatcagtaaaggtattactgatacaacaatggataatattgctaaattagctggatatagtaaagcaactttatatgtttattttgaaaataaagaagaaatctttttctcattagtttataaacatgccaaatggctttacgagactattgaaaaaattattcagattcaaccaagcactcaagaagagtggcagaaaaattatttaaaaatttgttttgcattgcaaaaactatgtgaaacctatccaatatattttgacggaatgattggtcatatcaatgttgatatgacctctaaagaaacacctcaagtatatagagatatttaccaattagggttagatataaatcagttaattaacacacttattgaagatggtgttcacttaaactatcttcagacagaattagattttaaccaatcaactctttttttctggagtgcactatcgggtatcattcgtatggcagaaaacaaaaaagaatattatcgcttacttggtcttgataacaaaacctttttagaagaagaatttctaactttattagcatgttacaagaaaggataaaggaacatgaagaaaaaagttattattacaacaatagcagcctttttatttattctttttagtgtaggagccattatttttactattggaaaaaccgctaatacccaaactaatattcaattagaaagaacttcttcagacatcgaacacgcgttatactatgcttctttcgcagctaattcccataatactcagagttggaaagttaatttagatcctaagcaaaagagattaggggtttttctgaataataagcgttccttaaatgtcgttgacccaaataatcgagaactttatatttcaattggttgttatattcaatctctaaaaaaatcattcgaagcttatggatataatgttagcatttctaatattgctccttctaaagaaaacaaatatcaagttgtattgataaattatcaaaaactaaaaaataataaaattaacaataaacaattggatatcatccaaaaacgtcatactgataaaagaaaattccagaaaaaaccaattaatagaacagtcgtttcaagtttaattaaaaaatatgataatgtttactactatgctaagggaagtaaaacatttaaatatctacaaaaagggagtctcgcggctgctgctaaacagtataaaagtcaagattttttaaaagaacagggaaaatggttgcgtttttctaatcaggaagctaagaaaaaacaagatggtatctctggtgatatgttagggttaaatcctataattaaaaccttttattatctaacaagtaatcataagaatgccacgagtaataattttgtcaaacagagtaagaacactttaattaatcaagtagagaactgcgcaggtttttttgtaattacaggtgaacagaatatttctaaatggattgctgttggtgaaaaatcgcaagctttctggtatgattgtgttagaaataacattgcagttcaaccgattagtgccatgattgaaattccctcctataatcaaaagtttcagcaaaatttaggtaaatcacaacctgttcaattaattttacgagtaggttatgttaacagttatggtaaaaatgttggtcctcgtcgaaatttaaaagattatattactgtgaaaaaataatctgctattattataacttagctatatgacacagctagaacgggaagtagcaaacaagtattatggtagcactcactgtaaaagaaaacatgctaatagaacattaaaaagaccatagcaaactgacctgcaccctaaaagttgggcagaaaatctaacaattggggtgttttttgatgaaattaacgtatatgaaaagtctttcaaatcgctcgacaaacttgaaaaagccatcactaactacatttttgactacaacaagaaacgaatcaagacaaaactaaaaggactcagccctgtgcaatacaggactgaatcccttcaataatttcttgtccaactttttggggtcagtacagaaacgtttgtacactctaaaatctaaagattaaattttagaaaagtacatttgccaaaatcttattttacagcgtctttaagagctttgccagctttgaatgctggaactttagaagctttgattttgatttcttcacctgtttgagggttgcgacctttgcgtgctgcacgttcgcgaacttcaaagttaccaaaaccaataagttgtactttttcaccctttgcaaggtaagatgatactgctgagaagacagcgtctactgctgcagctgaatctttcttagtcaattcagtagcttctgctacttttgcaatcaaatcttgtttgttagccatttaacaaatcctccaatatttttataagcctttataggctttaacaggttctatcttacctaaaaaacttagataggtcaagtatttaatgccattttaacgttttttctttaaaatatcaaagtttatttcatcactaaccaaatttatagctgttgactttaaataaatgcctgcatcattgtctattttttgcaaattgatattaacaacagacttctctggaataatatcaacaaaatttggcagtttgtaacttgatttaatataactaagaacctctgatgctggcagaggaagattgcctactgaaaaggaagtcactttaagctggacagctccgctttttaactgataaggttcaaaatagatataaagaggtacgttataacctagaagtttataagttccttgaaattcaatgtttgttgaagttagttgaacactgtaggtcatacccttagactgataatcattcaaataacttgccaaggtctgattcaattgttctttagttgtcgtaattgttccaaccttaacaggattttttactgtttgacttgttattgtattagaatggtaaccgctcaaaacacgactgataatcactccccaaaaagcaatattgagtgctaataaaaacagaaaagcccatttccaccaattttttttatttccagttcttctttgtttcactgattttctccattattgcttttgacatgatttgataaccaacattattaggatggaaacgatctccttcagaaagggcatcattggttacttctcctgactctgcctcactgtcagatgttccaacagccttttgctccccattaacacctttataaagtaaatcgtttatgggaacaaaataaacgtttctatactctgcgacaaccttttgcgttcccttattccaattgtcaataatatcctgcatttgcgtcatattagggaaatttaaataataaggattgtaaataccaatgatataaatggggagatccttattccttcttctagccatctggataatttttcgcaaatgcttctgataagttttagctggctgcctaaaagaagatacttttaagtttgttaatccctttcgaacaacagtcataacatcatttccaccaactgttaaggtcattaaattagccttattcaaacttttttgaatttttctctcttttcgcatccgtatcaaaatttgctggcttgtattgcctgaaacaccataattactgcttaaaacattatagtgataatttgatttcaactcttgcgataaaaggggaataaagccgccttgatcagtcgtatcaccgactccttgtgtcaaagagtcaccgatagcaatatagtgaaaagatgtcgctttggatttgtttaatgaagatttctgatcgctatttttaaaagataacttcgctgttggaataaaaaaataaaataataagctaaaaataagaagatttgcaagaaagaaagcaggtcctttaggaatttttttactcataatgcaccattactgcaaaagcaccttcacctgtatgagtctgaataattgaccccgtttctaaaacagcaatatctttctcaacataagcttgtaacttgtctttaagaccattagcaaaatctgaagtcccagcataggaaatgccgatctcagcaattttgcggtctttgatagtcgcaatcaaattatccagccacttgttaaacgttttattaccgcgtcctttcgcaataggattaagagcatggtttttcagttccataacaactctgatattgagaagagaactgattaagcctgtcacacggccaattcgtccacctttaaccagattttctaaggttgagacaccaataaaaagttcggttttcttttttacttcttcaacccttgccaaaatttcttctagactgctacccttttgagctagtttagcagccgcaataacttgaaatttcatggcttgatctgtaaaggaagagtctaatacagtgacatctgctccagcaatattagctccttgacgtgaggcctcaagtgttccagataaggaatgggtaatatgaatagcaacaatttgttccgccccctctttaataagcttttcataagtttctgcgaacagaccaacaggtggttggcttgttttagggagtgacttactgtttcgcattaaagaaagaaatttcccatcttccttaagatcgttatcagaataaacaatgccgtcaaccataacggttaaaggaacaacagtgatatccaatgcttcaactaaatcgggctcgattgtaatagaagaatcagttacaattttaattttactcatttcttatcctgcttcatttcttttctaaatttatattagtattgttattataccaaataatcaagatttagggaaaattttaaaagacagaaaggattaaaattactttgctgttaaactttaagatagtttaaaatagttttctactagaagcaatagtccaaatcaaaacaaaaagattgaagtaagagcatatttattaaaatactttctataccaatctcttatttttttaatagttctttagcttgctggcgcgcagcttgggtcacattatcccctgccaacatcttagcgatttcttcaattctttcctcttgatttaaaaggcgaaccgttgagacagttgtggctttgctgctttgtttttcaataaagtactgataatcactgatggcaatgacttgcgggatatgggagatagctaaaacttgaccgtgattgcctattttgtaaattttttgagcaatagcctgagcgacacgtcctgaaacacctgtatcaacttcatcaaaaacaatgctagtcttatcttcacgacgtgaaaaagctgacttaatggctaacatgagacgagacagctctccaccagaagcgactttgaccaaaggcttaaagtcttcgccaggattagtcgaaatatgaaaagcgactgtttcatttccctcgcgattaaattttcctttagtaaaaacaactttaaaatcagccttatccatgtagagatcttttagttcctgcttaatctcctgagacaaggtttccgcaatggcatggcgtttttgactcaattgagctgctgcttctaatagtgagcgctccaaaatttttagttctttttccatatcatcaaaagcgaggccatttcccgtcaaatgattgtattccttactgatattgtcaaaataagccaaaacatcatcaactgaaccaccatacttacgcgtgatggtgttgataacatcaagacgtgcttcaagtttaaccaaagtattggcatcaaaatccatatgatccagtatggtctctagacgtttgctaacatcttctaaaatatagtaagattcgctgagattattggacaaatccttgtactcagcatcatattcttccaaactctgcaaatcattcatagctgaacgaacattggtcaaactcgaaaaatcttcattatcaagtaaaacataagcattggttaaggtatcaacaataagcttatgattcataagtttatcacgttgttttaagagcttggtatcctcaccagattgtaagtttgctgcttcaatctctcctatctgatactccagcatttcaatacgtacttgatattcttgctcattcttacgcttattcaagacgtgcttacgtaagtcccgatagcggtcaaataagtcctgataatgctgcttgcttacctgaaatacctcatcaccaaattcatccaacaactgaatatgcttttgcggccgcatcagttcttcttgatcatgctgtccatgaatatcaactaaatactgcccaacggcacgcagagttgccagattaaccatttgaccattgatacgactaatactgcgaccattttgtaaaatctcacggcgaatgattagctcatctgaaaaagcaattccctgatcagccagtaactgctctaaagaaggatttttatccacagagaaaaaaccctcaatctctgctttaggactgccatgacgaatgacatctatgctggctctactgcctagcatcatattcatggcatcaatgacaatagacttccctgcacctgtttcaccggtcagaacagtcattcccctttcaaaattgagtgagatttcttcaataatagcaaaatttttaatggcaatttctaaaagcatacccactccttatgatttaattggccatccaagatttgatttcttgacgaattctatcactatctttagcatttttaacaatcaaaagcaaactgtcatcatctgccagcaagctaaaaataagtccttcaaatctctctagtaaaaaacgtttcaataaatagctatttccaggaacaacatcaatatgaatgagatgctctaaacctgccacctgatctgaaataaacttaactgctttttcagctggttttggtgttgactcttcttttttgcttatttccttagaaaggccataaatatagcgaccatttgaagctggtactttaatgataccgacctcattaatatcacgggaaattgtcgcttgcgttgcttgtaagccttcgttctctaaaagtttgaccaattctttttgtgtttcaatttcattttctaaaacaatttttttaattaattctaatcgttcacgtttcttcattctttttaaattccttatgtgcttgttcaacaatcgatttaatcttagtcaagacttgattttgggcttgagctgatttttctaaataggctaaaaattcaatattgccatgaccgccctgaataggagaaaaatcaagttctttaactgttaatccgtaatttgtcgcaaaagttgttactgtctccaaaacagtttcgtggactgacttgtccttaacaataccatgcttaccaatctgttcacgacctgcctcaaattgcggtttaattaaagcaacaacttgaccaccatctgttaaaatcttagataaggctggtaatattaaattaagtgaaataaaactcacatcaatggaagcaaaagttggctgtcctcgttcaaaatcgctaggctctgcatagcggaaattgtactgttccatgctgcagacgcgttcgtcttgacgtaatttccacaccaactgattggttccaacatcaacagcatagactaattgagcaccattttgcagcatgacgtctgtaaaaccacccgttgaagcgccaatgtccaaagttatctgtccatctactgaaatgacaaaaacttttaatgctttttccaatttcaaaccgccgcgactgacatattttaatttgtctccctttaactttaactcagtcgtttcatcaattttctcgccgggtttatcataacgttctccattgatgacattgacaaccaaacctgccataacacctcgcttggcttgttctcttgtgttaaacagtccttgtttataggctagaacatccactctttccttaggcatggagacgcaacctttctattattgtttcaattccagtagcattaaattgttcctctaaagctaatttttggaaaatagcttgcgcttgattgagagaatcttccaaaatggcataggacttgtccaagcccaaaagactgggataggttgatttatcagcttcgatatccttttgtggggtcttaccaagttctgaaaaactagctgtcacatctaaaatatcatcacgtacttgaaaagccaaaccaactaattcacccacctgacggagccgagcaagggctttttctgataattctgctattattcctgcggctacaaaaggaaaagtcaagagttttcctgtcttattggcatgaatttgagctagttggtctgaattgagttgaacatgttcacccttaatatccaacatttgcccaccgaccataccatagcttcctgcagcatctgacaattctgctactaattttatcttgatatcagcccttaagtccgccttggccagcaaaccaaaagggtctagaaaaagactgtcacctgccaagatggctgtcgcttcaccaaatttcttatgattggtcagctgtccccgcctataatcatcattatccatagcaggcaggtcatcatgaacgaggctgccggtatgaatcatctctagacttgctgccacctgatagtgagcttctgtaagtaccaaaccaaagccttgcaagatttccaatagtaagagaggacgaatccgtttaccgcctgcagcaacagaatacaagaccgcttcaaccaaatcctgagacacatgagtttgcgtataataatgcttaatagcctgattaatgtatttaatcttatctttcacaattcgtccatttctgcttcactgccatcagcctgcatgactttgaccaaggtcttttcagcagactccaaggttttctgcaaatctttagaaagcgccattcctttttggaattgagtaatagcttcttcaagaggaatttcaccggtttctaactggttcacaatttcttctaaatcctgtaaattttcttcaaatgttttcttcttgtttgacattttctacctccacttggacctgcccatctttcatttcaagatgcaagcgatctccttttttgatctgttgggttgattgaataatgtgattatctttttgaacaatagcatagccacgcgccacaatccgagtcgtatccagtgacaaaagcgcatcttgtgctttttcaaaacgggctaatttactatcatattgactgctcatgtggcttaacaataaacgctgatcttgttttaattgtgcttgatagcgctgaatacaccctgataaattaaaggacaacaatctttgtctcagcaaatgttccttgctatcataaacatcataaacctgccgcaccttggtcaacaaatgtgttcttaaatgatccaatttttgaacataagcatcatagagtctttcaggctgtctgaaaataactgatctttgcagtttcttaacttgttcatccttttgtctaatcagacgcataacagcctgataagatctcatctgtctttctttaagaaaagctaataaatcagccttggtcacaggtgttgccaattcagctgctgctgttggcgttgctgctctgcgatctgccgcaaaatcagccaaggttgtatccgtctcatgtccaacgctggaaataatgggcagatgcgattcaaaaatggcctgcactacaatctcctcattaaaagcccagagatcttcaatagaacccccaccacgaccaacaatgagcaggtctaaatcagtacgttcattagccaaacgaatgttgtcagccacttcctgtgctgccccttcaccttgaactttagttggaaaaagtaaaatatctacaccgggaaaacgacgcgagactgttgtgataatatctctaataaccgctccactaggactggtgacaacaccaatctttttaacaaactgcgacagtctttgtttatgcctatcgtcaaaatagccagcctcagccagttttttcttaagttgttcaaactgaatagccagtgcaccgataccatctggctctgccttttcaatgatgatggaataagaaccactaggttcatacagttgcacacgaccaataacattgattttcatgccttcttcgagctcaaagcccaatttcctataaataccgctccacatggtcgcctgaatgacagctttctcatctttaagggagaaatactgatgattgggacgtcttctgaaattagaaacctgacccgtcagataaactcgttccaaataaggatcgcgatcaaattttaattttaaatatttggttaaagaggatactgataaataatctgacataaatatcatataaagaccaaagacaaaggaaaaaggtattcttgaaatcctgttccaaagtctaaaacaaatgaccgtttttcttgatctttcgcctgtctttatcttggctccttttccgttaatatagctgttattattataccaaaaaatgaaaatttatacttccttttgaaatagaaaaatgagagcagcagttcatttatctcctcataagaatggagaatgacagaaaaatataaattgatgatatatacaacctaaccttttcatggcaatctaaccagtaacttttaaaaataagcaagcttgaaaatctaaaataaaacgtttacaatagaaaactagaaacagacgtcatcaaaaaaatatttcgaaaaagagctttttttgctaataagtaactgtccgtattagatttcaataataggagaagcacaatatgttaatgatattattatttcagagacttggtattatcatgattctggcatttttactagtcaataacagctattttcgacagttgattgaagaacgttctaagcgtgaaaagctggttcttattatcatttttggtattttcgtcatcatttccaatatgacaggaattgaaatcactagcgataaaagtttggtggaacgtcctattttaacgactatttctcattcagattctctagctaatacgagaactttggttatcacaacggctagcttagtcggcggtcctttagttggaactgttgtgggtttcattggtggtgtccatcgtttcttccaagggaatttttctggtgctttttacattgtcagttctgctttggtaggatatattagtggtcgactgggtgatcaattaaaaactaacaacctttatccatctacttcgcaggtcattgttatcagtattattgctgaaagtattcaaatgctctttgtcggtttctttactggctgggatttggttaaactgattttcattcctatgatgttgcttaacagtctaggttcgaccttatttctagctattctcaagacctacttatccaatgaaagacagctgagagctgttcagactcgggatgttttagatttgacgcagcaaaccctgccttatttaagacagggactgagtcagcaatcagctactaaagtgtgtaatatcattaagcagcatactaattttgatgccgttggtctgactgatcgaaccaatgtcctagctcatatcggcgttggtcaagatcatcatattgccggacaagctgtcaaaacagatctctcaaaaagtgttattttaaacggtcagccacaaattgccttagataaaacagccattgcctgtccagaccaaagctgtctcctcaattcagccatcgtcgttccgctcaagatcaataatgagacagttggggccttaaaaatgtacttttctggtgataagaagatgaccgaagtcgaagaaaatcttgccctaggtctcgcacaaattttttctggacaattggccatcggtattgccgaggaacaaaataagttggctaatattgcagaaatcaaggccttgcagtcccagattaatccccattttttcttcaatgccataaacaccatcagtgctttgattcgtcttgatgccaacaaagctcgatatgctctcatgcaattaagtacttttttccgaaccagtttacaaggcggacaagatagagaaatcactttagaacaggaaaaagcgcacgttgatgcttatatgaatcttgaaaagctgcgctttcccgataaatatcaactggattatcatattactgtttcaactaaaatgaccctgcctccttttggtttgcaggttttggttgaaaatgcggtgcgtcatgcttttaaagaacgcaagaaagacaatcatatttgcatttccataacagatcagggagagttttacaaggtggccgttagcgataatggtcagggtatttctcctaatatgattgacaaattaggacaggaaactgtatctgaaagcaagggaacaggaacagcccttgttaatttaaacaatcgcctaaatttactttatggcagtgctagtcagttacactttgacagtacagatcaaggaacaaccgtctggtatgagattccttatcaaaaaggagataaagatgaacattttaattcttgatgatgaaatgttggcaagacaagagttaacttttttaattcagcagagtaaggaacttgatcatcctgatatttttgaagctgaagatattagcagtgctgaaaaaattctctttcgccagcagattgatttaatttttcttgatatttcactcagcgaggaaaatggttttaccttggccaaccaattagagcaattggcacatcctccacttgtcgtctttgcgacagcctatgatcattatgccgttaaagcttttgaaagcaatgctgctgactatattttgaagccttttgagcaggggcgtgtggataaagctttggctaaagttaagaaaatacaacacttatctacaatagatgaaacagctacgacagaaaagaaaggtatggaactgttaacactgactttagcagatagaagcattgtccttaagatgccagacattgtggccgctagcattgaagatggagaactgaccgtcagtaccaaaaacacgagctacaccatcaagaaaacattgaattggtttaaaactcgcgccaagaccaattatttcctgcagattcatcgcaatacagttgttaatctggaaatgattcaggaaattcagccttggtttaaccatacgctcttactggtgatggtcaatggtgaaaaattcccagtcgggcgttcctatatgaaagaattgaatgctcatttgaccttataaatgaactagtttcattaactcctcaaaattttcatttgacaattttacattggcattaagaagttggatattgcaattcagcttcttttttttgcaatcggggacaattttgaaaacgttttacacaaaatgagctacaataacattgtcaagaaaggaaggagtcgttcgtattatgaaacacactagtaaagtaacacaatcaaaatcagcacctatgtttattcaaatgtctatctatgctgctattctgctcgtttctcagcttatttcagaattattgcctaaagccttaccgattccaaccaccgttattggtttaattctcatgtatgtcctcttgtgcagccatattatcaaaattgaatgggttgattccttgggttccttattaattagtatgattggctttatgtttgtcccatcaggtatttccctagcagccaatttaaatattctcaaagctgaaggattgcagttggtcgctgttattagcctatcgaccattctcatgctagtcattgtcacctatatcacttctatcattctgtccattaaaaaggtgaatgtggcaagtctgtgggaaaaatggattgctcatagctttgaaaagaaatttagcaagaaagtagagggaaaataagatggcactgttaaaatcacctatttttggtatttgtttttcattaatcctttatacgatcgggcaagatttattcaaaaagagtaaaggcttctttctcttacaaccccttttctttgctatggttgcaggcattatcgtacttgttttattggcaaaaggattgggaactgatgttaaaaccttatatactcaagcttataaacccggcggagatttgattttctggttccttaatcccgcaaccattgcctttgccgttccactttataagaaaaatgacgctgtcaaaaaatattggaaggaaatcatcagcagtttgattatcggtatggtcgtttccttagtcatcattgttgctatttcaaaagctattggtttaagccaagctagcactgcttctatgctgccgcaggcagcaacaacagccattgccctccctattgctcacgctatcggcggcaatactgccatcactgccatggcttgtatcctaaacgccgttatcatctatgctttaggcaaaaaattagttgctttcttccacctcaataagagtgaaatcggtgttggcttaggtttaggaacatctggtcatacagttggtgcagcctttgctctagaattaggagaactacaaggtgccatggctgccatcgcagttgttgtcatcggcctcgtcgttgacttggttattcctatctttagctacatgataggattagtgcactaaaaattaaaactgctatcgataagacaaaagcctctcacggatgattccgcgaaaggctttttaaaagtaggggtatgaaaggaaaacaaaaaaattcatttaattaataaaattctacctcacataatttgtcaattaaccttataaatcgtattcagcaaagacctctttagcatctatcatattaccatctaaaatatcttgatatcctttgtctaatttagcttttaagcttgatagattacttcttgttctgaagatttaataggtgaggaaaggcaattcatcaaattttaaaatatcgtttaatactattttcgtcatatcactcactcatctccttcattactcttgttatctccgcactgattctggttggtaggacgacgtaggcctctttgctcaattggtctgctatgtaggagtggaggaagacagcggctgcggcaacctcaaagcggtctgcgtgaaattgagcaacaaagcctgcaatcattccagccaaggtatctcccataccgccagtcgcttgatagggaccgccaacttggatatgtccgattttttgtccttgataaatcttggtctgatgggattttgcgactaggatggtttcttttggaaaatgagctagtgctgtttgtgttgctgcttctatctgttctggaatagtcagtccagacaatctttcccattctttttgatggggtgttaggattatttgcttggttggccaaatagctggttttcttttggctaatagatttatagcagagccatcaataatcaaagtctgttttggtttgatagcctgccaaaccacatcaaaggttgtttgagccaagtcatcttctgccaagcccggtcccataagaaccacatctgctgctgttatttgctctgacaaacgatctttttcaaccatatcaaaagccatagcttcgggtaaatggctgtgcagagctgtgatattgtccttatgggtcgcaaccgtcaccaaaccagctccgctattgacacaagcaagggcagccatgatgatagcaccaccgtaagggtagttgccgccaatcaaaaggacacggccaaaagtccccttgtgactgttaagaggacgtggtttaattatttttttcgttaaaagatcatcaataatcatttggtcacacttcttaaagctgcttgataggtttgttccaaaagcatggtgatggtcataggaccgacaccacccggaacaggagtaatgaggctggctttttgagcgacgtggtcaaagttaacatcgccgataagttttccatttttgtcacggttcatgccaacatcaatgacaacagcaccttctttgacaaattcctcagtgacaaaatttccttgaccaatagcaacaataagcacatccgcacagcgtgtgacttctgataaatgtttcgttctagaatgggtcagggtaactgttgcatttttttcgagcaataactgcgccattggcttcccaacgatattggaacgaccaataataactgcatgtttcccttcaagatcaacgtgataggcactcagcatttccataataccagcgggggtacaaggtaccatcatggaacgaccgctccacaaatgaccagtattcataggatgaaagccatctacatccttatgaggatcaatggctagaatgattttcttatcattaatgtgagccggcagcggcaattgaaccagaataccatggaaggaaggatcttgattataaccttcaataatctcaattaattcttcttcactaatagagtcagataggcgtatggtttcacttttaaatcccgccttgatagctgagtgctctttattacgcacatagacttgactggcaggattatcacctactaaaatcaccacaagaccgggaacaagcccatgtttttctttcatctgttcaactttattggctaaatgcaactgcagcttttgtgccaaggctttaccatcaataatttctgtcattctcatctcctgaaaaaatactgcttttattataccaaaaaaggcgagcagataacacgctgctacacctttttttctatatttaaatattataatcagttcaaaatatgaagctttgtcttaatgtgtcttgcttgattttttcatctcatctttaacagggcaggcacagtcacaatcgccacaagaacctttctgcttaatataatgacgaattcctaagaaagctccagctgcaattaagatagcaataataaaggttgacatagtcattcttcctttctattagttatgacttaaacttaaattatctaaggtaatcactttttctttgacctgacgtggttttctaataataaagtaaagcatcacaagcaataaaacaagagctaaacctgtccaaagcgtcactggcttaccataaaaagcaactaaaccaagctggtaaataattaagctaacaagataagccagacccgtttgataagcaatagccactaaagtccacttcagatttcccatttcgcgtttgatagctccgattgaggcaaaacaaggcgcacaaagcaaattgaaggtcaaaaatgaataggctgccaaagctgtataatccccctgaaggctaacccatagtgaatgcgttgtttctgttgcatcgggattattgtagagaattccaaaagttgcaactactgtttccttagctgcaagaccagtcagagcagctacagtcgccttccaatttccaaaaccaagcggtgtaaagatccaagccaagagacgaccaagactagccagaatactgttttccgtatcaactgaatgcaaagtaaaattataggaactcataaaccagattaaaacggttaaactaaagataatcgttccagcacgcttaacaaaactcatagccttaccaaaagcatagcgcaaaacagcatcaacctttggtaaatgataacttggtaattccatgataaaaggactcgtataaccgcctaaaaaactagttttcttaagggcaatacctgataaaataatagcaatcattcccatgaaataagcacttggagctatccaaggattatgagggaaaaaggctcccgcaattaaggcaatgacggacagcttagctgaacaaggcataaaagtcgttgtcataatggtaatacggcgatcacgttcattctcaatggttcgactggccataattcccggaacaccacaccccgttgaaataagcataggaataaaggattttcctgaaagtccgaaacgtctgaaaatccgatccataacaaaagcaattcgactcatataaccaatatcttctagaattcccagacagataaagaggacaaaaatttgcggtaaaaagccaagaactgttccaacaccagcaacaaccccatcaataatcaacgattgtagccaagcctgcactttcaatgcttctaaaacacctgtaacaaattcaggtacgtatttaccaaaaagaatatcattaacccaatccgtccccattgttcccactgtttgaatggacaagtaataaactaagaacataacgaccgcaaaaatgggcagagccaaaacgcgattagtcacaattttatcaattttatcagaagcagacatcttaaaatcattatcttgactttgtgccatttggctcacacgttcaatgaaagcataacgctgattaatcacgatggactctgaatcttctgtgaagacttcctcggtgatttgaatgatgtctttaatttccttcttttgaaagggagataaatctaattcctcttcaaccaaacggtcgcgctcaaataatttgatggcataaaaacggctagaacgttctggtactgtctgaccgagaacctcaataatttgggcaatcgctgcttcaaatttggcatcgtaagttgggtattgaacactatcaacactgcccttagttgtttgactggcttttttaacagccttgtcaacgcctgtatttttcaaagcactggtcgcaacaactggcactcccatctgataagccaatttatcactattaatagattttccttgattttttaacacatcgctcatattaagcgcaatcgttacaggaattcctgtctcaattaactgcgtcgttaggtaaaggttgcgttccagattcgtggcatcaaccacgtttaaaatgctgtctgcatgattactcagcagataatcacgtgctactttttcttcaggactgtacggagacatggaataaatacctggtaagtcctgaacactaatctctttgagctttttgacattaccgctcttacgctcaacggttacaccaggccaattcccaacacgctgacttgtccctgttaaaaggttaaataaacttgtctttccgctattgggattcccaatcaaagcaatttctgtcatttttcctcctgattgtctatcttaacaacactaatcatctgtgcttcagattttctcaaggtcaactcataaccacgtaaactgatttctattggatctcctaaaggagctaccttcctcaaataaatctttgtatgacgcgtcaaccccatatccataaggcggcgcttagcttcattaacagcaaagatattgtcaatatatgcaaattgacctacttctaactcagataaaggcaatgtttcaaccgtttcctgactttcgctaacatcaatcttacttaaaattgaatcatcaaaagctaaacgactggatttcagcataacgatagcactggatttcgtttttgaaatcaattcaagacggctgcctacttttaaaccgagattggaaagatgtctcacactatcttcaggcaaattgatactgacaacagtataaggaacatctattcttgcatcctgcagaatcaaattctttgacctcctctcacagttttgataaaatgaatggtttataaacttagtatatcataattttctctattttctgatagaattctgtaaaaaaggtaaatgagaaacattataaaaaagaagctgagtgtactcaccgctgaatctttttagattactatgcggagtacaactctcagcttttttcttttataacacttttccaaggaaatccctggtcctttcttctttggcatttttaaaaacttcttcaggagctccctcttcaacaataataccatcatccatgaaaatcacacgatcagccacttcatgtgcaaagcccatttcatgggtgacaatagccatggtcatccctgatttagcaaggtcttgcataacacttaacacttcgccgaccatttctggatcaagagctgatgttggctcatcaaaaagaagtacgtctggatccatagccaagccacgcgcaatagcgatccgctgttgctgtccacctgatagactttgcggataggctgctgccttatcacgcaaacctaccttatccaaaagctgataagccttttcttctgcttctgccttactaagccctttggttttaataggagaaagtgtaatattttccaaaacagtcatattagggaaaagattaaattgttggaaaaccattcccatcttttcacgcattttgaaaatatcattggatttatcggtaatatcaacaccttcaaacgtaatgctccctttggttggtacttccaaaagattcattgtccgtaaaaaagttgactttcctgatcctgatggtccaataataacaagaacttctccttgtttgatatcaaggtcaattcccttgagtacctcatttttaccaaaatatttatgtaaatttttaatactgataagtgtttctgacattagctggcatctcctttaccaaaacgattttcaagtaatttaacaagtgctgacatcaaggttgtcaccatcaaataataaaaggcaccaaataaaagtggggtcaaaggcagataggttgccgttacgactgattgagcgccattccatagttccataaccccaatcgtttgtaaaagagagctgtctttgataattgtgataaattcattccccaaagcaggcaaaatatttttgaaagcttgcggcaagatgacatagcgcatggcatttaccggcttaattcctaaagaataagcggcttctaattgtcctttaggcactgcttcaattcctgcacgaacaacttctgaaatataggccccactattaagtgacaggacaataatccctggcaaaagacgggaaaaatccaaatctaaaacaccaaatttaacaattggcatattggtaaaatgcaaaaggacaaaagaaatcataatttgcacaaccataggagtaccacgaaaaatccacacgtaaaaggaaaccagccaatctaaaaccttgatacgactgcgtttaatcaaagccacaagaacaccaataatcgtcccaaaaaagacaacacaggctgaaatcatgatggttacaagaacaccataattaaaataagcccaatatttagataaaaatgaaaaatccatgagttactcctctaaaatgatatgacatattatattacaatttgaataaaaatacaagttaccttttaacaatttacaagagcaaaagcagacaaacaacaagtcccctaaaaactattatttaatcaacaacaccaaaaagaaagctcttgtactgaactttaaaaaggagtccagaactcttttgttccagaccccttttttgaataactattaataaagtaaatcgtagatttccattgcaataaggtcaatactatcaaaagtataagtctcatgcgcagcaacatcccgcaaagtaaagacaggaccgttttctggatcattattaaaggaaacctctgcaacaacagcaccatcacgttcaaaatgacgtttcaaattattgctgtcagtcgtcattaattccaaacgattaataattctcaccaagtgtgattccatgatattctcctattcgttttttaactcttttcattttaacacaaataagctaaaaaaacagtaaaatagttgatttttagatattttttaaggagtgatacataattgctttaattgaatgtaaacgattttctgcctcttgaaaaatagtctggctatgcttttgaaatacagcatctgtcatttcaagttctttataaccgtaccgctcgtaaatttctcggccaatttcagtattgagatcgtgaaaggccggtaagcaatgcaaaacaagagcattgggctttctaaccctattaagcagagcttgattgatctgataaggcagtaataaatcgatcctttccttaaaatcaacctcttctcccatggatacccagacatctgtgtagagaatatcagtatcggcaacagctgcagtgtcatcagtaattgtaattagcccttctgtctgatgatttttagccaaagttacaatttctgactcaggctgcagctctttaggcgctatgattttaacattgatccccaaaatagccgacgtcacaagtaaagaattggcaacattattgcggccatctcctagataagctaaggtcagatcttcaaatttcccaaaatgttcttttacagtcataaaatcagcaatcatctgtgtgggatgccaagtatctgttagtccattccaaacaggcacaccagaaaattccgctaagagctcaacactttcttgcttaaacccacggtactcgataccatcaaacatggttcctaaaactttagccgtatcaacaagagactcttttttccctaattgaatgtcatcttttcctaaataagacacattcattcccagatcttgtccagcaacagtaaaagcactccttgttcttgtagaggttttttcaaaaattaaagcaatattgagtccatccaaatatcggtgtggaatgcgttctttttttaattttttaaattgcatagcaagatcaatgaagtcttctatctctttcttactgtaatctatttcctttaaaaatgattttgcttttgtcatgattcatctccttgaatttttatactctatttttacatttttattcatatttgtcaagaacagctttaactaaattagctctaatccattcgatattacaaaatgatagccaaatcatatcaattttttaacttccaatctttttacttgatttataagcgaatgatgctataattaacgtataaagtttgaccattattgaccatttctttaatgagcaaatcttgtattctatgacgaaaggggtattcatattatgctctgtcaaaattgtaaattaaatgaagcgactattcatctatatgctaatgttaatggtcagcaaaagcagattgacctttgtcaaaattgttatcaaattatgaaaacggatcctgaaaatggacctttaaatcatctttcgcaacaaaattcgtcacccaccaatcctttctttgatgatttctttggcgatttgaataattttcgtgcctttaataatcaagatctgccaaacacaccgccaacacaagctggcggcggcaatggcaacggaggcaataatcgccgtcccggcggacctcagcaacaggcctcccaaaagccaaatgggttgcttgaagagtttggtattaatttaacagatattgcgcgcaagggtgaaattgatcctgttattggccgtgatgaagaaatcacaagggttatcgaaattctcaaccgtcgcacaaagaataatcctgttcttattggagaaccgggtgtcggtaaaactgctgttgtcgaaggactagcgcaaaaaattgttgatggtgatgttccacaaaaattacatggaaaaaatgtcattcgtctggacgtcgtcagccttgttcaaggtactggtattcgaggccaatttgaagaacggatgcaaaaattaatggaagaaatccgtcaacgtcaagatgttattcttttcattgatgaaattcatgaaattgttggtgctggttctgctggcgatggcaatatggatgccggaaatattttaaaacccgctttggcacgcggtgagcttcaacttgttggtgctacaacactcaatgaatatcggattattgaaaaagatgccgctttggaacgtcgaatgcaacccgtaaaagttgatgaacctagtgttgcagaaaccataacgattcttaaaggtattcagcccaaatatgaagattaccatcatgtaaagtatacagatgaagcgattgaagctgctgcaaatctttcaaatcgttacattcaggatcgttttttacctgataaggctattgatcttctagatgaagctggctctaaaatgaatttaacacttaactttgtagatcctaaagaaattgatcaccgcttgattgaagccgaaaatctaaaagctcaagcaacccgtgatgaagattatgaaaaagcagcttacttccgtgatcaaattgccaaatacaaggaaatgcaatccgctaaacttgataaggagaatactcctgttattaccgaaaaaaatattgaagtaattgtcgagcaaaagaccaatattcctgttggtgaattaaaagaaaaggaacaatcacaattaattcatctcgctgacgatcttaaaacgcgtgttattggacaggatgccgctgttgataaaattgctaaagctattcgccgcaatcgtgttggactaggcactccaaatcggccaattggttctttcctttttgtcggccctactggtgttggtaaaacggaactctctaaacaattagctattgagctttttggttctgaagatagtatgattcgtttcgatatgagtgaatacatggaaaaacatgctgtggctaaacttgttggtgcacctccgggatatgtcggttatgaagaagctggtcagttaaccgaaaaagttcgtcgcaacccttattcattgatcttactcgatgaagttgaaaaatctcacccagatgtcatgcatatgttcttacaagtgcttgatgatggtcgtctaacggatgggcaaggacgcactgtcagctttaaggatactattattatcatgacctcaaatgctggtacagggaaatctgaagctaatgttggttttggtgccagtcgagaaggccgtactaattctgttctaggcgaattgggtaacttctttagccctgaatttatgaaccgttttgatggtatcatcgaatttcaggctttaagcaaggataaccttcttcaaattgtttctctcatgctggatgacgttaatcaacgtttagctgttaatgctattcaccttgatgtaactgataaagttaaagaaaaattggttgatctcggttatgatcctaaaatgggagcaagaccgctgcgtcgtactatccaagaacatattgaagatgctattacggatttctacttagagcatcctgatcaaaaagaactaaaagctattatgacaagcaatggcaaaattgttatcagggcttctaacaaagtcgaaacggttaccaaagcaacttcagattaaagaaatcaggtctttcctgattttttctttttttcaataattgggcaaatatggcattttttagtataataaaaagcgaatctgactggttaacaattgaaggagagaatatgacaaaccatccgacctttggtaataaattagaaaatgttgattacaagacgcgctatggtgtttatgctgttattccaaataaagacaagactaaaatcattttagtacaggcacccaatggatcttggtttctacccggtggtgaaattgaagcaggtgagaatcacttaacagctttagagcgagaactcattgaagaactaggttttacggctgatattggccattattatggtcaggctgacgaatatttctactctagtcatcgtgagacctatttttacaatcctgcctacctttatgaagtcactcagtttacacaggttggcaatccgctagaagattttaaccacttagcatggttttctattgaggaagcaaaaagtaaattaaaacgaggtagtcataaatggggaattgattgctggcaaaaagaccaagagaaaaactaaattaggacagcatttccgtaaaattaatgctataatattattatgaatggatacaggaggaaaaacatgagattaatcaatacgactagcagtcatcaacatttagttaaaaatcaactaaaacatactgatgctacactcgttgaaacttattcagctggcaataccgacgttattttcactcaagcgcctaaacattatgaacttttaatttcaaacaaacatcgtgctatcaaagataatgaaattgaaaccattcgagaatttttcctcaagcgtaaaattaataaaaatattattttattagatcaattaaaaacactgcatactgcaaacctaattgagatttccattccaatagctgattagaaatcatctgaaacttagcacagctttattccaatattaatagttaaatagtgagaatatagaaagaaaagatcttcttttaagactttccttaggtgatacagacggtagcgatgaggaaactttcgtttccttatgtcccaacctgaaatagctttatgactatttcagccttcggaattccacatctaaaaccaagatacaaagggcgttaagcggataaaggcaaaatagggagtacgacgcggaatcattaagattctaggaggactcatctttttgccacaatccgcagcccgtggtcagttaagatttgagcctaaggtctcaaatcttccgagtgcctgaaactttaatgtttcaggcacttttatcacggcagaaaatctcgtttagagctcgcttcgctcgtaaataaggaaaattaaaatttgcagggcttaaaaattttttacgttgaaaaatagatttgtcttcagcctgaaatagtttgttttatcttatctgtctgctttagactcaataaaaatcaacaggctaggcaaacagccaatgaatagagcgattttaccttttcttcgtcacagccccaactacaaacaagcttaaaagatctcacagacccttttaaggtagaataaaggccagcaaagctaaggaacattagtagcaaacttttgattttttagggtattaattgagctagaaagcaaaaaagacttgaactcatcattctcaaatttttgagaacgaaagagctcagtctttttatttgctttcaaatccttgcctaacagcttcagggaaatgattttctacaatagctgcacaatgattacaaattgtaacatgataaggacgttctttgacagtttcatcaatgcgacgacaacggtcacaaacatgcccccgagcatgttccacactaaaggctacatcttcaaagacaagtgcattttttggtgcctgttcttgagtcactgtcaattgtgacacaataagcagttgggcaatgttgctatcaagagcagtcagaagcgttttaacttcttcactagcatagacagtcaaatgagcttctaatgatttaccaataattttagcattacgagcttcttcaagtgctttttgtgcttgatcacgcagagacataaaagcactccatgtatccaaaatttcgtcttggttggcaaattcttgcacttcaggcatttctgctaactgtacaaatgcttcttcttcatgctctaaataagaccaaatttcttcactcgtatgcggtaaaatcggcgtcaatagcttagtaatatttaccaagatttcgtaaaagaccgtttgcatttgacgacgagctaaatcgtctgctgcttcaatataaacaacatctttagcaaaatcgaggtaaaatgctgataaatcaacagtcacaaaattaacaacagccttatagatagtcatgaaatcataatggctgtaagcccgattaattactgaaactaactgattaaatttgattaacatatatttatcaacagaacgaagattctcaaaggcaatcttattaatataaggattaaaatcagtggtattagcaatcaaaaagcgaagggtattacggattttacgataagtttccgaaacctgacctaaaatttccatagatacacgaacatcactatcggtgtcgacagaagctacccaaaggcgaagaatttcagcaccatattgtttggcaacatcatttggcgaaataatgtttccttttgatttagacatcttctcacccttgccatccagaacaaaaccttgagacaagacggatttataaggcgcatgaccgttaacagctacagaagtgatcagtgatgaattgaaccaaccacgatattgatcagagccttcaagatagaggtctgcaggatagcctaagtcttcacgtgtatttagaacaccattccaagatgatcccgaatcaaaccaaacatccataatgtcattttctttagtaaattcaccatttggagagcctggatgagtaaaaccttcagggagaagatctttggcctcacgttgccaccaaatgactgagccgtgttcttcaaacaaattggcaacatggtctgtcacttctttagtcataatggcagtgccatcttctgcgtagaaaattggaagcggaacaccccaagcacgttggcgtgaaataacccaatcgccacgatcacgaatcatattataaagtctcgttttaccccaagcaggataaaaatgaaccttatcaatttcatcaagaatgtcttgacggaattttgaaacagaggcaaaccattgtgggactgcacgccaaataattggtttttttgttcgccagtcaaaaggataagaatgcgtgataacttctgatgctaaaagcaaatcacccaacttttctttcactgttggcaaaactttgtcatagaattgtccttcaaaatcaggaccggcattttccatcatgataccacgttcgttgacagtaacaacaacatctaaaccatatttgactcccacattatagtcatcctcaccaaatcccggtgctgtatgaacaatccccgtaccagaatcaagggtaacatgatccccattcatgactaattcttctacattatcatcccatggatgaattgtcacaatgcggtcgagctcaatacctttatgagttgctaatacctgagggttgtcccaagcaaaacgttctgctaattctgaaagaagagcttgtgctacgagaaatttacgttcgtcattagctggtttaacaactacataatctatatccggaccgaccgtcaaaccacgagaagctgtaatggtaaatggtgttgttgtccagacaacaatataagtatctgtatctagaatatctttaccatctttaacacgattagcatagtaaagagaagttgaatcaatatcatgatactcaatctctgcttctgcaagagctgattcagaagaccaagaccaataaaccggtttagctccatgataaatatagcctttgtcagccatagcaccaaagacacgaatttgagcagcttcatacttaggaacaagtgtgatataaggattctcccaatctcctgaaacacctaagcgtttaaagtcctgacgctgcttatcaacttgactcaaagcatactgacgacacatgtctaaatagtctgctaagtcaatttctttacgtttaacaccctttttagcaaggacttgttcaataggtaaaccgtgtgtatcccaacccggaatataaggtgctcgaaaaccagacattgatttggaacgaataataatatcctttgaaattttattaagagcatgtcctacatggatatttccattggcatagggtggcccatcatgcaggaaaaaagctggtttatttgcatttaattcttgacgtttagcataaatattagcttcatcccactgtttttgccattgtggttctttattaggaaggcctgcacgcattgggaatgctgtttttccgagattaagcgtttcttttaatttcatgacaactccttataatataattacgttttgctttggaattaggaatgaggaatgagggggtctcattcactatacttacggataaaaaaacttaatttgttaaataacagaaaatcattagactaactgctaacttattacatttccttaagataaaaggaaaggcaataagtatatttctctccaaaaaattaccatagacttaaatcaataaaaaagaactttcatcaaaggacgaaagctcgtggtaccaccttaattcagaaagttctaaaaaatttttcttagcccaagcagtgactcaagatggcaaacctaccaagagtaactaacgcaggataaggaaaacttattggaatttccctctttagattcgtaaggtgaatctagccaccttctatcctagaaaatcagatagaaacaaacaaaatgataagcttcaattaagggagcatagatcttacaccatcacctattcgctaaatctattaattaagcttgtgtttttgttattcgttaatatttaatttaaaagtctgtgtttcattcaaatttggttgctcatccgctgactcatttacttttgtttcatcagctgcctcgataataagaggctgttgatcatcaactgtagactgaccagcttttgtctcttccagttctttattactttcagaaacacgacgatgcaattcttccatttcctctggagtaaattgacgtgtcacctcaataggttcagtatcagcagcatctggaacatgttcacctaaaacttgctctacgacttctttgaaagcagcatctgaattctgtaaataaacagcagttggttgaagtaactctgtccattcaggagaatttgcaagtgttaactgaccttctactacagataaaaggtgttgatggaagacacgactttgacgctttaattcttctgtttcaactgcaatacgtttagcttcatctgttgcatcgcgaagaatctgattagcttttgatttagctgcatcaactaattgttgcgactcataagtggctttgttaagaatgttagttgattcagtattggctgataatttcactttttcagctgtttcttgagccaaaataaccgattgactaagagattctttcatttcatcaaaatagcccaatttatcttccaactctttgatacgattatctttctcacgattagtacgtaccaactcttcatagtcatcaactacaatatccaagaattcttccacttcctgagtattgtaaccaaacatttttgtcccaaatgttttatctttaatttcaagtgctgtaattgccattctattctccttatttatgtgtgattcgatcaattattaatttatgctttccgccttttgaaaggccgttgtctctactgatagtaaatctgccataacctctaacactaattaaatcaccaatgtcaatcaagtgagagacttttggttgaactaagtaatttaatttgactttttcgctttcaattaattgatttgcttttcttcttgataattttaaaacggctgcaataattttatccagacgcatacttgataccaagacattcatttctctaatatgagattggcttgttatttgtctttcaaaagggatttcttcaaaaacaactgcggcttttcctattttagtaacctgtgcgttaaggtaggagaccattgttttttcgataaaaacctgagcacgattttcttgaacaataatatcacctaaaagataacgttcaatacccaatctattaatcagggttcccaaaatctgagaatgtgttagctgattaaacttactattatagttaatctctaacaaactaatatgaaagtctgctatatttaactcataataagctggtgctattaacaaacgagcattttcagaagagataaaatcagaactctgataaacctgtagttttgtttgacctaagatacttttcatcactgtaatctgtctaggatttaagaattctgtgacacaaaagctataagtatcctctatctgtttgatcagatcatacgttttttcaattacttcctgctcttctgctctaaaatgttggtaaatatcttgctttgtcatcattttttaaataagcaaaagaaataagaatcgttttaataactgcaaaagcaaaagaataacaataatcttaaaatctaatccagcaaattgaaaatcaaaacgtctaaaaggctttataattggctccacaatatcaaccaaaagttttccaagccaagtatcataagcattaggaaaccaagacaagagagcataaattactagcaaaaaggaataaatatcaactactcttgctagaataagcacaacatatgccataaccattaacgtctcttcatatcatagttaaaactaacatcttgtccatttgcggcaagagtcatttcttcagcatcaacaataacattaattggcgttaaaagatacattgaagccccaaccttttgcaagtttcctgctaagactttactcgcaccatcaataaaatctaagcaacgacgtgcttgtgcttccaacatatattggaaatcaatcaaaacacattcatttctaatcagcaaatcaacaatctcttcagcatcttcatatttacgaggaagcttaagagcgattgttgtcttttcttgggcaggctgttgattatgagattggcgacgtgttggaagtgaatgaatattttcctctccagaacgacgattctgtccagactgtacttgctgctgacttggtctggaggctgattggtggtattggtgactttgagctttttgctgctgactagcaggttgagctgcatcttgctgccgtttaacagacgcaacagcaggctcttctacttcactgacctcatcagtatcaaagtaggaaataattttgttaaagctgtctctaagtgccatatatatctccatttcatttaaagaatgcactgccaattctgacaaaggttgagccatttcgaatagcaatcggaaaatcgccactcatccccatactcaaatcatcgaaaggcatattcttcagttttctttcttttaagttctttctcaacgcatttgctttttgaaaaatatcagttaactcttgttcggaagcatctattggagccatcgtcattaaaccgataactttaatcttatcaaaatgctgaatttcttcaagcgccttgtcaacttctgatagtctgaatccatgtttgcttgcttcttcagatatattgacttgtaaaaaacactttatttgatggtctgcacgcttttgaatttcagcagctaattttacagaatcaagagcatggaagtagtcaacaaaattaatcacatccttaaccttacgacgctgcaaacttccaatcagatgccaagttaaatcgtaagattttaaagcacgatatttatctaggaacttatcaacacgattttcagcaatgtgcttaaccccagcttcaacaagtttttcagctgtatcactgtctacatattttgtaactgcaataacagtaacatcgtccttactgcgccctgacttttgagcataggctgcaacttcttgaaaaacgtgttctttatttgcttgtaaatccattattaacgattcttaaagaaaggaggtgtttccaactcatcgtcatcatcagaatcagcggaaaaactactcatttttagttgactatcaatttcaccttcggttggacgagcaatattttcacgacgaagattccaatcgccaaaagctgattgctgtggctcagatgatgattgagtttgctgcggttcagcagcaggcatctcaggtgattcattcaaatcaaaatcaaaattttgacggcgttcaaaatttggctgcgcagaatttgaagacggagcttgctgttgtgctcttggttgtgtataagatgaagcttgacggcgaataccagagacttggtcagctttgtctggccgaacaccagtggcaactacagtcacacgaatttcatctttcatactgtcatcaattgatgttcccaaccaaatgttaacgccatgacctgcagcttgattaacaatttcagaagcctcttcagcttctgttagcgtcatatcaaggccgccggtaacattgacaatcacatcttctgcaccatcaattgtcgtctcaagaagtggtgaatagatcgccttgcgagcagcctcaacaacacgttcttcaccagtaccgataccgattcccatcagagcatttcctttacttgccataactgttttaacatcagcaaagtcaagattaataagtcctggacttgtaatcaggtcggtaatcccctgaacaccttggcgaagaacattatcagcttcactgagtgcttcaagaagcggtgttttcttgtcaacaatttcaagtagattattatttgaaataataaggagcgtatcaacttcatctctaagttcattgataccttcaattgcataattgccacgtttactgccttcaaaaccaaatggtcgagtgacgacagcaactgtcaatgaacctaaacccttagcaattcgagcaataactggagcggctcccgtaccagaaccaccacccataccagcagtaataaaaaccatatcagcgccagtgagtgcttctgtcaaagcttcttcgctttcttcagcagctttacgtccaatttcaggttggcctcctgcaccaagaccacgggttaattttggtccaagttgaataactgtttcagctttagaactactcaaagcttgaatatcagtgttagcagcaatgaattcaacacctgcaacaccttcatcaatcatacggttaatagcgttaccgccgccaccaccgactccaataactttaattactgcaccttgtacagatgctgcatcaaatgaaaatgccattttaatttttcctcactttaattttagtcgaacatgctaccaaagataccacgtaaacgatcacccactttttgttttggctcatttgcttccttctgttgaggcggcaattgttccaattgtgattcaagagtagtcgactcttgcgattgagcaaaacttctagttttgggtgcaacacctgatggcttaatatcaattggttttcttcttaatttttcatcaccagaaaccgcaccttgcgctaaaatatcaacttcagtaagtgttcctacgtattcaacaatgctaataatattagcaaacataggatttctgatgccgacttggtttggaacatgaagtttaacattggaaccaaaaatttcttgagcgatttctacaaccccaggcataatagcagctccacccacaataacaattccaccaggcagatctaataatctaccgcgttctaagtcttgtttaatacggtctagcaagtgacgaacacgcgctgatataatttcggaaaggtagcgttcagtaatttcaaccggattacgttcacccaccacttccacctgaacagtttcagttgaactcgcttcagctacattagcttcaccaaagttaaacttaagcgcctcagccacttggtgggatgttttaaggactttagaaatatccttagtaacataatcaccaccttcggcataggtattggtgaattgcaattcttgtgctcgcattgaagctactgtggtttgaccgcctcccatatcaatgacggtggctccaaactcacgttctccttcattcaaaactgacttggtaagagccagtggagaaataataatattttcaacttcaatacctgcacgttctactgttttacgaagattatgcaaaatagtacttggtccagtataaattagaccgcgcatttctaaacgaattcccatcattccgcgaggatcgcgaataccttggaaaccatccacaatgaattcttcaggaataagtgaaatcacttcacgttctggtgtgatgctctttgttaaagctgaacgaacaacactatcaacatcttcatctttgatttccttagattcactaggaacaggaatcattccctgtgttggctcaatttgcaacagatttgccggtagaccaacattaaccttgctgattgacatccctgctttttcttctgcttcttttattgctgatttaatggcttctgccgcagtatctatatcaataatgataccgtcttttacacccgaacttttgacattgctaacaccaataacattcatactgccattgataaattcagcaactaaaactttaatcgagcttgttcctatatccaatcctgtaaaaaagccatctctagccatttactcgacctctctatctttccaatctattactattaaaaactgtcaaaaacagaattattcagaaaatattataccataaaaaaacgtaaaatgttaagctttttacgttttttgttatagaaacttaatttcctatctctcattgttattattgagatacggttgcctgcgttactgattgtgaaccctcttgtgaatttgcttctgaagattgtgttgaatcagtattttcagcattagaggagttctcagaagattctgttgtagctgttgtcttatgttctgcaatcgaagcttctatatctgcagttgtactataaatccccacctccatatcaacaatactgccgtctgtaagattctttttaattttagaataataaggtaattttgtatcaatttctgataaaggaacacgaacactgttgttatctttcatttccaataaaagcagatccttagtagagctggaattaacagaagaaatgactttaatactaccaactaaggatttattaagctttgccaatttttgaaccagttttcgaacctctttttcctgatctaaattaatagtcacaaatgaaccaggtaattctgaagcgttaacggtatcaacacgggtaccattttctaaaattgggacatagcccttatccgtttgtctataagcaataatacgatattcttttactcttaaagtaaaatgattgggaaaatgataaactaattttgcctcctttacccatttatctttagacttaagatttctttcaaaacgattggcctgaaaaagtaaggtcgttagataatctgatttcttaatccctaattcttcaattaactgagattcaatggcatttttattacccgaaacagttatctccttttgacgactcaaaggactaatcataaataaggaggcaattaaaacaatgcttgaaatgataataaccatagcagcctgccagtagtcctttcgaggaagttttggcactttcttttctttttttatctttttaggtgtagctggcttttttttaggctcttcttgttttttatcatcaaataaacttgaaggttgcttatcactttccttactgtctgcttctttatcagtttgaaactgagcctttttttcagccattttcttttcatttagtttttctttttcgcgtttttcttcttgttttttcttaagaaattccaaattgcgctgctgccattctgtcaaaggaatttcttgcttttctgtatctttatctttcgccattattttcctttactcttagatgttatatctgttaacaaaagattgtaaaaatcattcggagtctttatctcacttgatgaagtcattttatcttgataaacggtttgattttctaataaatctttgatcactttatcaagttctgcaaagtttagattttcttcagataattgttgggcataacctttttcctcaaaataagcagcattttcaagctgatcaccacgactagcttcttttcctaatggcacaatgatatgaagttttgccatagcaagcagctcaaagatggtgttggaaccaccgcgtgtaataacaacatctgctaaatccatcaagggctgatacatttccgtcacgtaatctacacgataaagattttggcttaaattatttaatgttttatcgccagaaatattgataacattataatgcttagtgagttctggtgtatcagaaataaattgattgaaaactttggctccagctgaacctccaataaacagcaaagtttttaaacgaggatcaaaatattctttaatcgttttaatttctgtattatcatcactgctagaaatagtttgattaactttagtaatagctccaacgtgttttgttttagtcaaattatcagactgttcaaacgttgtgtacatggtagtggcaaatttataagcaattcggttagccagtcccattgataaatcagattcatgaacaaaaacagggattctcaaaagattagcggctacaacaggaggaactgaaacaaacccacctttagaaaatagtacttgtggacgaaccttcaccataatcgcaagagactgcagaacaccccaaccaaccttgaaaacatctagtacatttttcaaagaaaagtaacggcgcagtttacctgttgcaattgaatgaaagatgacatcaaaatctgactgctcaatttgttcatgctcaatgccatgtttatcaccaatatagtgcacttcccagccatcttttaaaaagcggggaataaggagtaaattaagagtaacatgaccgactgtcccaccacctgtaaagataattttcttttttgccatgcctattctcctttaagagacttaaaagttgtgataaattcatctccacgaacttcaaaatttttatacatgtcccagctagcattggcaggactaagaaggacaacatcttcaggactagcttcctgaaaagcaattcgagttgcttgggcaacatctttggcattgagataggtgacaccagcttgtactgcagcatgtttaaggcggggagcagattcgcctaaaataatcattttcttgagtcccttaatatctggaactaattcgtcaaattcattgccgcgatcgagaccaccagcaattaatataaccttgctattatcaaatcctgacaaagctttttgagtggctaaaatattggttgacttactatcattataaaatttaacaccagcaatgttccccagagactgcaagcgatgcttgacaccaccgaagtggataagtgtttctctgatggcttcattagaaacacctgataacttagccacagcaattgttgctaaagcattttcaacattatggcttcctggtacaccaagctcagaagctgacataatggcttgtcccttgaagcagagcatttggccatcaagataagcaccatctactttctccttagttgagaaaggaataatctttgcctgcgtttgattagctaagtccttggccaaatcctgattaaagttaagaacaagaaaatctttttctgtcatatttttttgaatattccatttagcttcaatgtaattttcaaatgaaccatgatagtcaatatgagttggcatcaaattggtaatcactgccatatgcggatgaaaactttccgttcccatcaattgaaaagaagacaattccataaccaaaatatctttctctgttactggctgagccacttcactagccggaaatccaatatttcctgaaagtcgtgctgactgtcctgcatgattaagaacatcggcaatcatagttgtggtcgttgttttaccattagatcctgtaataccgataatcggagcttcagaaatcaaataagctaactcaacttctgttataactgggatatttttttcaagcgcacgaaccaccatcggatttgtataaggaatccccggatttttaaccatataagcaaatgcttcatccaaaagttccaaaggatgactgccgcaaatcacttttatgccttcctctaaaagtgcctgcgctgatggattttcatcaaaagacttaccatcattgacagttacaatagctcctaatttcgccaagagacgtgccgcagcttcacctgatcgtgctaagccaagaaccaaaacctttttattttcaaaatttttgacgtgtttcattgttactttctttaccttctcattaactagatactttaatattttacctttaataggagagtttttcaagattttacaatagattaaatcataccttactcctacaaaattaaaacatactttcttcttttaagttattagtattataaataaaatgacactggatttaaatgatccagcgccgtttcttatcttttatttttaggtctcgttcgtaaatgcaaaacatctttcaaagcataataaccaacaataatcataccgattccaataaaaatctcaggtggtgactgtatgatccgaataaaagtcatgcctgctaagaccatcaggaaagcgataattcccaccacggaaatcatgttcatggtatttttaattgtcttaggagcaataaaaatgtaatacattaaaagcaaaatagcgatgatagcataaaacattttttctccttttcattactaagccttctcaatcttcagctgattttttcttcttagccgctttagcacgcgcattcttatcaagaatttgtttacgtaaacgaatggactcaggtgttacttccatgtattcatcatcattcagaaactcaagtgattcttcgagtgttaaaatacgcggcgtcttaataactgctgtctgatccttagttgcagagcgcacattagtcatttgcttagcctttgtaatgttgactgtcaaatcattctcgcgtgcattttctccaataatcattccttcatacacttctgtacctgggttaacaaagattgttccacgttcttcaatagacataatagaataagtcgttgccttacctgtatcaattgaaacgagagcaccacgatgacgaccaccgatttcagcattgataactggcatatatttgtcaaaagtgtggttcatgataccataacctcgtgtcatggataagaattctgttgggtagccgataagtcctcgagctggtgctaaaaatataaggcgcgtttgaccattaccagttgcttgcatatcaagcatttcacctttacgttctgaaagggactggataacagcaccttggtattcttccggtgtgtcaatttgcacacgttcaaatggctcacatttgatgccatcaatttctttgataataacttctggacgcgatacttgcagctcatatccttcacggcgcatggtttcaataaggattgacagatgtaactccccacggcctgaaaccgtccatttatctggtgagtcagtggcttctacacgaagggaaacatctgtttgcaattctgccaacaaacgctcttctaccttacgcgaggttacaaatttaccttcacggcctgcaaaaggggaattgttagctaaaaaggtcatttgcagagttggctcatcaatgtgaagaataggaagtggttctacagcatcagttggtgtaatcgtttcaccaacaaagatatcttccatacctgaaacagcaatcaaatcgccagccttagcttccttaatctcacgacgttccaaaccgaagaaaccgaaaagttttgtaacacgaaaattctttgttgtaccatcaagtttagaaagtgtcacttgatccccgactttaacagaaccacggaagactcgcccaataccgatacgtccaacaaagtcgttataatcaaggagagacacttgaaattgaagtggctgatctgaattatcgatcggtgctggaatatgctcaataatagtatcaaaaacgggtgccattgtatgttcttgatccgctggttcatctgataatgaagaagtcccattaatcgccgaagcgtaaacgactggaaactctaactggtcatcatctgctccgagttcaatgaaaagttcaagaacttcatcaacaacttctgccggacgagctgatggcttgtcaatcttattcaccaccacgattggaaccaagttttgttccaaagcttttttcaaaacaaaacgtgtttgcggcatggtaccttcataagcatcaacaacaagaacaaccccgtcaaccattttcatgatacgctctacttctccaccaaaatccgcatgtcctggtgtgtccataatgttaatacgtacaccattgtaggcaacagcagtattttttgcaagaatagtaatcccacgctctttttcaagatcattagagtccatcgcacgttcttctaatttcttatgctcatcaagtgtatgcgattgttttaagagctcatcaacaagggttgttttcccatggtcaacgtgggcaatgatagcaacatttctaatatcttctctaaaatttgtcataattcctcttacattttacattaatttatttcaacttatctattataccataaaaattagggaaaaactcaggagagatatgtaaatgttttaaaatataaaagaaaaaccaagatagcaaagtcgcagtcttggtatctccaaattttataaaataagtcctcaatcaaccagtattgcaaaaacaaaagacaacagctcatactaatccctgtcattatctcaaaaaagaactaattcttctcttttacttttccattccaattatctaaaccatttttaaggacataaagatctttataacctgcctttttcaaagttaaaacagcgcgagcaaccagctgtccacgagtattatcatacaataaaaccggtttatctttgcgaagagctgaaacagatgctttgaattgttcagagggaagattacgagcccctaagatatgcttacgacgaaactcattgggagaacgcaaatcaacaatttgtgcgcctctcatcatgctttcaaattcagcatttgagatatactgggcagcacggcgaacacgaaaataattccaaacaaaccaagccacaaaggcaaagataataacccacgaaatgatagagataattgacataattttcctttaactttctaaaaactgatgtgcaagactggctgccccaataataccagcgtcatttcctaattctgcaattttaatttttgtagattgcttcacttgtggaaaagcatacaatttaaaataactttcaatatgtgagcgcaagaattctccagcagctgatactccacctccaacgacaactgtgtttggattaaggatattgctgatattggcggttgcaaggcctagatagaaagtaactttctcaacaactgagtttgcaaatttatcacctgcctgtgcagcaacaaaaatatccttactgctcacatcatcaccattatcaatgcccgctttaatactggaaattccttcatattcttctgctaaatgacgtgcaacacggacgacacctgttgctgaagccactgtttcaagacagcctttattgccacaggtacactcaaaaccagtatccggctcaacaataatatgtccaatttcaccacctgcaccagcaactccatgaataagattgccatcagcaataataccgccgccaacacctgtaccaagtgttacaaagacaacatcaggattattattacccgcaccaacccagcgttctccaagtgctgcaacattagcatcattatcaatagcaaatggtatccccaattctgcttcaattattgttcctacctcttgggtaacagcccaattaagattaaaagcacctgtaacagtctttagattacgatccacagctccaggagatcccattccaataccaacaaaatcctccttagttaaattatagagtcccaaacgatgcttgatagaggacacaatatctggaacaatatgtttcccatcttccaaaatattggtttcaatagcccatttctcctgaacttgtccatctaaagttaaaatcccaaatttaatacttgttccaccaagatcaatccctaaaagtttcttagccattttctctttccttttctattctgtgctccctgcgtaaaatcaattcagcatgtagataatcactctttgaaatcaaaccattatcatagagtctttctaactcaattttcatcatttcaatatcataaagacgtttacctaaataaacatagatgccaaattgttttaacagccgctgcacatcatataatgttttcatctctcaaattctaccaaaaaaacagaaagttttcaagattttttgcaagcgcttgcctctttcttaataaaaaaagcctgacttcaacaaatgacatatctcaattgctggacaactaatccaacgtctgggatatatcaaaagtgtcagactttcacctaacatagaaaatctttctaaataaatgacttcctatcttcacatacttataaaccgggagcttgcccaagctctgcctgcaacatccagattgccttttgggcttccgtttgagctgctgtaaagatatcattagaaacagcatcaccttcctcatctgtcacatcaagacctacttgataaagacttgaaaggtaatcataaacttgaacaaggcgtttaagatgatcagttattgatttatcccatgtgccaactgtttcttcaagtctggaattctcatcaaattctttcaaggttgaaaacggagcgccaccgatagtaatcaagcgttcactaatctcatcaagatgaccattcaaggcatccatcaattcatccattttaggatgcagataaagaaagcctgaaccacgcatataccaatggacttggtgaacaatggaagctgcttttgacaaatccgctacagcctgattaagtacagccttggttttttcatttcctgaattttcttttttctccacttgatgaataatagaagcgtagatattttcagtaattgtattcgtcataataattcctccttaaaaaatattctttttataatctatattttagaacgattctaaataaaaagcaattattttgttttcttttaacgaataaataggtatgaaacttattttattttttatgttgggagcttctcttggctctttctttggcttagttgttgatcgttaccctcagaaatctattatatttcctagaagccattgcaataagtgttataactgcttaaccatgagggatcttatcccaatattttcacgaatcatcaacaaaaattcttgtcgcttttgcggttaccctattccattgcgttattccttggtagaattactctgcggactgattagcacaggttttgctcttgatttattaaccacttcacaagtatgtttgctcttcatgggagttcttttatctctttatgatttacaagatcagtcttatcctttgacactgtggataggctttacttttctcttaatgtttatctatcctcttaacctaattagcttaattctttttctatttggtatttttgctgccctcaaaaatattaatatcggaagcggtgatttcctctatctggctactttggcactttctcttaatcttcagcaaattatttggattattcagattgccagtttattaggaattctttacagcctgctttttcaaaagcacaaagaaccttttgcttttgttcctttcttattcttgggtcacctcattatcattttctctcacttgatttaaggattgtaaggacacaactctaaagactttaaacaaaatatcaaaaaggaggcaatcaaatcaaacgtttattacattggcaatgagattacactcaataaaaatcaaaaaagacatacaataaattacagacaacatggcaaggcgaaatcaccaacattccattttgatttttgaaaaggattaaaaaatcagcccatcagagaaacaacattcccgactggctgattgaataattatttttgataatggcttcctgcataaatgaaatcttttatttcttcttgcattccttcatataatcccttgacaatttttgaaccaacaatgacaccatctgatacttggttaaagcgcttaatatctgctaaagttgatacaccaaatccagttaaaacagggatttgagcaatttctgtcaaatgttttaaatgtttatccaaatcatcacgataattccctgtttttccggtaacaccattaatagcaacagcgtagacaaatccttgagcatcttcaatgagttccttttgacgttctagacctgttgtcaagctgactaaaggaactaaagctaaatctaaattttccagataaggtttgataaaactttcttgttcatgaggtaaatcgggaataatcaatcctttgacagatgtattttgcaaatctgcaacaaatgtttcaacaccatactgaaaaacaggattaaaataagtcatgataacaagtggcacttgcgttttcttttcctgtaacctagcaataatgcttgccagcgatgtcccctttaccaaactacgttggccagccaattcaataacaggaccatctgccacaggatccgaccatggaatgccaatttcaatggctgatacaccttgagcttccaaaaaagaaatggtatcaaagagaccgtctaaacctttatcatgatccccagccataatataaggaataaaaagacctttgccttctgccttgatagcttgtaaatgttttgtcagtgtttttgtcataatctacttcccttcttttgcttcctgcttaagacgttctttaacctgagccacatccttatcaccacgtcctgagaggcaaacaataatggacttatccgctcctagttccttcgcaactttttgtgtcagagcaatcgcatgactagattctaatgcaggaataatgccttccagacgagatagcaatttgaaagattccagagcttcttcatccgtaatagaatcgtaagttgcacgtccaatttcattgaaatagcagtgttcaggaccaacacctggatagtcaaggcccgcggaaatcgagaaagcttccataatctgtccatgctcatcctgcagcacatccataagagcaccatgtaaaacacctggtcgtcctttggcaaaggttgccgcatgcttatcggtatcaagccctaaacctgacgcttccgcaccatacatggcaactgattcatcgttgacaaaaggataaaagagtccgattgcattggagccgccaccgatacaagctaagactgcatctggcagctgtccatttgaaactgtcgcaaattgacgtttagcttctctgccaataaccgattggaaatcacgaacaatttctgggaaaggagctggtccaagagcagatcccataacataatgggtatcctcaatattggttacccatgctcgcaaagctgcattgactgcatctttaagcacacgcgatccatccgtaacagaatgcactttagcacctaatagctccatccgaaagacattaagagcttgacgtttcacatcttcttcccccatataaatggtacattccatatcaaagagagccgctgctgttgctgttgcaacaccatgctgtcctgcacctgtttcagcgataatcttatttttccccatacgcttagctaaaagaacttgccccagtgcattattgattttgtgtgcacctgtatgattaagatcttcacgttttagataaattttggcaccaccaatataatccgtcaaacgtttagcaaagtacaagggagtttcacgaccaacataatcttttaagagagcatctaactcttcatgaaaactaggatcagctttggcttcacgataagcctcattcaattcaataacagctgtcatcagcgtttcaggaatgaattgtcctccaaaattaccataaaaaccgttgttattaggttgattatatgtcattttttcacactttctataaatcgtttaattttctctatatctttccgtccatttgtttcaacaccagatgacacatcaacagcataaggagcaaaatgttcaatacattctttgacattatcacttgttagtccacctgcaataaagaaaggcttttgtaactgctctgtctccaactgttgccaatcaaaagtttcaccactgccagctatgggagcatcaaagagcagataatctgctttacttgtcaaattttctttaccttttttaatttgaacagctcggataagcggaactgaaaagtcagtttgcaagtcttcatcatagtcaccatgaacctgtactaaatcaagaggaactgtctttatagcaatttttaattcctccaaagtcggactgacaaaaacaccaacctttttaactttttctggaatcattttagctaatttttgagcctgttctagactgacttggcgtttacttttggcaaaaacaaaaccgatatagtctgcaccactactaacagctgctgtaaccgcttcttgtgttgatagaccgcaaattttaacctttgtcaatagccaactcctttactttatcagcgacattatctgcctgcatgagagccgttcctacaagaatagcattaaagtaaggagcgacgagtttactgtcctgtcccgtaaaaatacctgattcggaaatataaaccttatcatctcggaaatgggtagataactccaagctggtattgatatctacttcaaaagtaacaagattacgattattgacaccgataatctgtgctccaatacgatgagctatttccaattcagacaaattatgggtctccactaaaacttctagtcctaaacctgcagcaaagtcatacaattccttcagtctcttctctggtaaagcggccacaatgagcaaaataacagtcgcaccagcattacggctacgaacaatctgcttctcatcaataataaaatctttagccaaggtcggaatactgacactgccagatatctcagccaaaaaatcaatatttcccttgaaaaaaacctgatctgtcaaaacagaaatcatagcagctccagcggcttcatacatttgggcttgtttgacaatgtcaacatctaagttgatgtctcccatactgggactagcttttttaacttcagcaacaatctgcaactggtcatgatgctcttttaaaaaatcaaagagacgataggttaagcgaagcggtttgacttcttccataattagaccagctagctcttcttgtttttgctttaaaatagtaggtaaaaactctttagtcaacttgcgcctcctgtaatgcctttaatttagcataagccttgcctgatgcaatgacttcacgtgctaggtcaatgccttctttaatcgaatccaccttaccattagcataaaaaccaagaccagcatttaaaagcgttgtctctaaataaggactaggttcatttttgagaacactaacaaggatttgagcattttctttagcatcaccacccttgatatcctcaagcgtaacttttggcatgtcaaaatcttcaaaagtgaaactaccttgtgaaatctgaccattatccaacagagtataatgatttttaccataaagtgctgcttcatccatattatctggtccagtgataataactgcacgtttgcgaccaagaagtttaagaacttgagctaaatcatcttgtaagtccgcctgataaaggcccaacagctgcgtttccaaatccatggggtgtgtcagtggcccaataagattcatgaccgttggaatacctaaggcctgtctagccggtgaaatataacgcatggctggatgcatcttttgagcaaagagaaagacaatacctgtctcatctagaacttgggccaatttttcaggagctaggacaacattgattcccaattcttcaaggacatcggctgaacctgattttgaagaaatagaacgattaccatgcttagcaatatggatgccaccagcagcgaggacaaagctacaagtcgttgaaatattgaaagaaaaggacttatcaccacctgtaccacaattatccatagcatcgcttgtttggctaggaataacagctgcattttttttaatcgttttaacgagacctaaaatttcttccggtgtttcccccttgattttcaaagccatcaagaaggctgctatttgtgcttctgacaattctcctttaaaaattttttcagcaactgctgttatttcagcttctgttaaattttcttgagcagctaatttttcaaaaatgtctttcatttatttgtcctctctgcattctaaccgactaatcttacaaaattctcaatcatttttaatccttcaggtgtgccaatggattctggatgatattgtaaaccatagatcggaagcgtcttatgctgaatagccataatctcgccatcatctactgttctagacgttacttcaaaatcttctggcagcttatcgactactatagaatgatagcgcatgatttcgagtttttctgctaattctttaaaaattggcgacgattttgtgattgccatctgactttgcttgccgtgcatgacttgatgagctaatcccagtttccctccaaaactttcagcaatggcttggtgtcctaagcaaactcccaaaataggtttttcccctgtaaagtctttaatcaaggcttccatccttccagcatcagctggccaaccggggcccggtgaaaagacaagaccatctgcctcttgagctgtttcataaagatcagcatcatcatttctcaataccttgacttcagtaaaatgaccaatgaattgtgccaaattataagtgaaagaatcataattatcaattaataaaatcattgtatctctcctattctagtcattgctttggccttattaatggtttcgtagtattcattttcaggaacgctatcatagacaatccccgcacctgcttgaacataagccttttgatttttgataatcatggtacgaatggcaatggcaaagtccatatctccgcttgctgacagataaccaattgctcctgcatagataccgcgcttttctttttccaactcataaatgcgcttcatagcacgaattttcggtgctcctgataccgtacccgctggcaatgttgacttaagagcatccataccagtcaaaccagacagaagtttacccttgacaacactagttaaatgcataacatagcgaaaaaattcgacttccatgtatttagacacttgaacacttcctacctcagcaattttcccaatatcgttgcggcccaaatctaccaacatacggtgctctgctacttccttgacatctgataagagctcttcagataagtctttgtctttctgatcgttggcaccacgaggacgtgttcctgcaataggatttgtagtaaccacaccatttttaagagaaacgagactttctggactggctccaataatctgataatcaccaaaatcataaaagtaaagataattggaagggttggtaatacgtaaattacgataaaaatctagcggcttgccactaatatctgctgagaaacgctggctgagcacgcattgaaacatatctccctgacgaataaatttttttgctttggtaaccatgtctttaaaagtagcttcttccaaatggttcctaaaagtcaaagtgtgtaaatcgcgttccgaaaattcatcaaccgcctgttttttaagatctgctaagacttcctgcaaggcagccttttgttcctcttcttctctgccgctgtaaatattatcttcaacaatgacaattttttctttcttatgatcaaaaataagataagattcataaacaaaaaagtgcatatccggtgttccaatcgtatcttgaggaatcttgccaatattttcataaagaccaaccatgtcatagcccacaaaaccaatagcgccaccattaaaaggtaaatcttgagacagttgtgatttgacagtgatttgactgagataatctaagggatcactttcaataactttgccattctctgtcaattgcccattttcaaatttgatttcaaaaacaggattgtaagcaacaattgaaaaacgcgcattttccttttcacgagggatagactccaaaatcaccttatggtcgccctgtacacgcatgtaagcaaggattggggtcaaaatatcagcactcaatatcttctttttcatattcagtctcactttctatttaggtcatgattactattaatctttagctctaaagctgtgaaagcctcaatcatcgtttgccaaatagccagagcaacatctggtgatagaccgagcttttctgcctcttgctgtctatttaaaaggacttgtttcactcgatcaggagcagtgacagctgcttgactgttgataggttttagctgaccaatcttttcaacaatttgctgacgttgcgctaatagaactaataattgatgatctaactgatcaatttgatttctcagattctggatacttgtcataattatcacctgcattaaaattgaatgaagataacaaaaaacctcacacagaaaatctgtgtgagggcgttaaatctagctaacacggtgccacctcaattaacgggaaccaatagtctttccccgttatcttaatctcctctaacaaggagttgcacgataaggtgtgctcaccggaagaatattgtttatcttcgctttctaaaaatcagcccacttcccaaaattctgctgcctgttcacaatacccacagactccctgaaaacaaaaggtttggtacttttctgatttatttcttacgattatacactttctaaaaaagaattgcaagcatatttgcgtattttatcattggtttgtgtcaagtttccctcgaaaaattttctaaagtcctaaatcattgtttgagttgcccttgttacactgtttaaagctatttgacttagaatctgaaaacatttaagatgcaaaataaataagccaatcgataacttctaagaccttataacaacaacttctaatctgagagataaataaccttttttataatattgaaaagtgataatttttaggatctataaaacacattgttataaaaaacaattctttaatagattaaattgttcttaacttcaaattatgctatagttatagttgctatcattatttattaaggagatttttcatgtcaaaaacaagagctgagctaaaagcagaagctaaagcacatctgcaagaaaactggggttacgccattggcttatatattttgccggttttagctgttatgggtatctacttggcttgcatcctcgtatatgctactctgactgcccctcttgtcctatctataggggaaactgcttttcttgcaacattaccacttctcattattctgtggttactagttttggtagtttcatccacggtgacaatcggagttaatttaggatttctgaacttctttagaggaggacgtccaacttatactgaagcgagtacctatcttttaaaagaaaaccgcttttggaagttcctctggaccaatgtgcttatggtcattttgctttacctatggtcattgctctttcttatccctggaatcattaaaacttacagttactccatgaccaactatattcttaaagacaaattggaaaaaggcgaatcagtaactgtcactcaggctattactgaaagccgtcaattaatgaacggtcataaatgggaatactttgtccttcagttaagctttattggctgggccattttagccaatcttacctttggtattggctatctttggctcgtcccttacattgaaacaaccaatgctgccttttatcaaaatttgattgacagtcaaatagcaaatcattctattgcatctctatctcaagaaattgaaacaggaactgtctaattcttaaaatcaattctaataccaaaagctagataaacatctggcttttttacttgctcatataaaaaaacgagcttgttttcaatctgaaaatttaatcccctttcaattataaaatttaccttaaaatgctataataaaagaaatgtaaatgtcttaggttatcatcagaaagaagactaaccaatgaaaataattaatgcaagcttttttattaaggcagacaaaagagaagagtttttagccgacaccctgcccttaattcgttcatcaagagcagaatccggcaacatcagctatcaactctatgaagcaattgatactcctaatcaatttgtgatggttgaagaatggcaagatcaaactgccatcgatcagcataatagtaaccctttattgattcaattgctggagaacttaaaaatgtacagctcagccgaacccattattaaagtgacagaaggctaggttaagcagaaaaggagtagaaccaaatcatgatttcctaaaaatcgaccttatcgtcccactccctttctcataccatttatctcatcatttcaagcgagaaacctgctactcctttagtatataacctttttagatttatttttcaacataggtatgaagaggatagctcggataggttatcaagcgagccttttctgatgtgatataaccagctggagcatcaagaacagttggaatgcgattgacaattgtaccacatgtgagtgctaccgtatcaggtttgttaactgagaagatgagatctggctctcctgtaatttcccagtcacacatatcgccatcatcttgtcgataaactttaccaatacattccacctctaagtcaatgccttgatgcgtttgaaccttagtgactgccgacattcctgtcacttggccagctggaatagtgcatcctaaggtttcagaatagacatcttcatctaaagtataaggaacgcttttttgattaatagattggatggtccaattcattttcgagcagatggcttccgcagcattccacatataagatggtaaactttccgcagaagcaatgtcacgttcaaaacgttctaaatcataaccagcgccgtgtgcctcagctagtgccaatccataatcttcaacattatagctgaccacacctctcacttttttaatcttattcattcctgccattgctaaacaaggcatgttaatccagtaaatgtcctgcatgcccgaccccataatagtgacatgattctctttagccaacttatccaaacgattggtctcagaaggggatgttgtccaaggataaatggcttcttcacaggttgaaatgacattaacaccatgtttgatagccatttcataaaattcatacatttctggcatataagaaaaaatggtaacaatagcgatatcggcatcacagttatcaaacacttggtcagccttatcagaaataataataccagtcttatgaccaaagccagcaaaatcaccaatatcctgtcctactactgctggatttttatcaatagcaccgacaatttcaacaccatgatctacaagataattaagaatgacctttgacattttaccacagccatattggacagcacgaatttttgtatttctcatgagaggttcctccttttattgttatagccttttagtactaggcagatacaaatttaatggcaaataaattccttcatcaaacaagaagagatctatagaatcttctctaatagctgcattaattaatatctttgaaaattaaaattcccaaaataccattatcggcaatgaactgcagaataacttgagttaaacaaggagattaacaacactataaaagataaactaaacagccatatttatgtcacaaatatattataatatctatagtaactatagagtcaaggagaaatgttatggagtttattttaaaaattggagatttttcctacattaataacatccctattcaaactctgcgttattatgataaaattggtcttttaaaaccctatcgcattgatcaaaagacgaattatcgttattatcatatcaatcaatctcagatagtagacgaaatccaatatttaagacagcttgacttttctctggaggaaattaaaggaatactttctaaacatgaaaatttgactgaactcaaccattacattaatgaacgacgccagtgtcttttatttgaaaagcaacgtttggaagagcgcttagcagaaattaatacctatcaagcaggtgcctttatgtatgattataaaaagcataaccaaggtttggaaattttgactttaccagctagacgaatgattatttatgaaactaaagaaaatatttatcaaatgactgatgaagcttatgaatttaatctaagaaaatttaaacaagctttgagaaaaaataatctctcttattcaaccttttctcgtgttggttctattattgagaaagaagatttcaaaaataaaaattggttatctcatcaaatgtttatgttctttaatgatattgtggaaaagtttaaaataaagacctacccttctgccctttatgcttcaatttattgttcctcttttcaagaggagattgaaaaattagacgatttctaccaaatgattgttgataagggttatcaaattaagggagattacatttgcgaggtcatttatgaacatcctaatttaaatcacaacaaaagagaaatatttattagaatgcaggtcgctgttaataaaggctaagaatttacaaaaaagttggataagtgtacgtatattatccaactttttttattagttaaaacttattcaatccatcatacctgcttggagttgatacattttgtgataggttccttttttcgctagaagttcctcatgagttcccgactcaataattttacccttatcaagaacataaatacagttggcatcttgaatggttgataaacgatgggcaatcgcaatggttgtccgtcctctacgcattttagccaaagaattttgaaccaattgttctgtttctgagtcaatattagctgtcgcttcatcaagaattaaaattttaggcgaacttgctaccgttctggcaaaagccaatagctgacgctgaccagttgaaaaacttgaaccaccttcactaacaggttcctcatatttatgagccaatttttgaataaattgatcagcatccacaaattttgccgcagcttcaatatccgcatctgtcaaatcctgatacatttttatattagacttgattgtcccatgataaaggaagggctcttgcaaaaccagaccaacatttttgcgtaattcttcttggctatagttacggatatcatgtccatcaatggtaacttgacctttttgaaattcataaaaacgcatgaaaacattaataatagaagacttgcctgaccctgttggaccaacaaaagcaatcgtttgaccctgattgactttaaaagaaatatgatctaaaatttgatgctgaccatcatatgagaaagaaacatccctaaattcaatattaccagctgaaatgctaatgtcactatcatcttgatgtggttcataatccctttcatctatcagatcaaaaacacgtcctgctgatatcattgaagtctgcaaggtcgagaaattctgagtcacttcaattaaagggtcaaagagacgattaacatattgaataaaggcatacatcatcccagctgaaataccaatagtctgccaattaaatccaaaataagccatcaaaagagcataagccaaaagcttcaaaagcgacatagctggacgtaggaaaagactgtccaaggccatagaacgattggcataatgaaaatgttcttcattgattgcctcaaattctgcttttaaacgctcttcttgtccaaaagcttgaataatattgatacctccaatactttcagataaattggtattgatatcactcaataaactcctcgttttagcaataaccttaacagactttttacgatagagattgaccaaaataaaaataaaaggcaaaaaaagcatgacaagaaaggttaggcgataattcagcattaacatggtataaagggtgacactaaaaataaaaatagctgaaataaaactagataagatgcctgaaaacatgtcactaatactttctgtatcattggttaagcgcgatacaatcgaacctgctggcgttttatcgaaataggccattcccaatctttccatattggcaaaggtatccctacgaatatcgcgaacaacactaaaagaaacacgcgcaaaaagaagattgccaaaatattgtaaaatcgtctgcaaaacatagagcaagtagtagcccagcaaaagtgaagctgctgtctgattgaaatgagtcaaaaaatgatcaataaaataagaggccactaaggggacgaaacttttaatcactgttgtcaacaaaaggaaaagcaaggcgaagaaagtcaaccatttatagggcttaagataagacatcagacgccaaaaaacatggccttggtgttcattattcttcatctatttctcctttcatttctaattgttgagattcataagttttagcataccagccgcctgcctgaatgagctcatcatgacaaccgcgttcttgaatgtgtccatcttgcatcactaaaatcaggtcagcatgcacaacagcacttaagcgatgagcagtaatcaaggttgtcttgtcctgtcgtgttttttttagattttcaatgatagcatgctcggttttagcatcaactgccgacagagaatcatctaagataaggatatcaggatttagaatcatggcacggctcatggcaattctctgtttttgaccaccagacaaagagacgcctttttcaccaataatcgtgtcaaaaccctgcggcatagctacaatatcatcgtaaacttgagataacttagtggcaccttcaactgctgtaaaagttaaattaggatcgccaaagcgaatattatccaaaatagacatggcaaaaagaacctgatcctgcggaacataaccaattaaactgcgcaaatcagccaaacgatactgacgaatatcatgtccatttaacttgattgtaccttgattaacatcgtattctcgcaaaagaagtttgagaagactggtttttcctgaacccgtctgaccaacaatgcctagtgtctggccttttttcaaggcaaaatgaacatctttaagtgttgcttccttttcataagcaaagcggtcaatatcatattctaaggaaccattttcaatctttgttaagggatgcttaggatctataatatctgatttttgagacaataaatccataatgcgttcataagaaaccgcaccacgctgaacaatattaaacaaaaaaccaatcgccattaaaggccaaaccagcatatccaagtaagtcacaaaagtaaccaaacttccgacagttacttgaccatttttaacaaaaaaagcaccaacgagcagcgtcaaagcataggaagctcccacaaacaaaagaaccagaggatcaaacatactatcgtacttcatggttatcatatttttagcaaaagtcatgtcatttgtttcctgaaaagaagctaattcattggtttgataaccaaatgattttgtcaccttgatacctgaaacactttcttgaaccttattattaagttctgaaaaggcagcttgtgatcgtttaaaactttcatgtgttttacgtcctaaacgactggttgctaaagccattaaaggcagaggaatgatagccaccaaggtcatctgccaagaaatgctgaaaaacatggtcattaaggtcaccaaagcagtaatggaagcatcaactgctgacatgacaccgccacctgctaatctggtcaaggaattaatatcattggtggcatgcgccatcaaatctcctgtgcggtacttctgataaaaagaaggcgacattttagtaaaatgctcaaaaagacgagagcgcataatttgccccaaacgataagatgttcctaaaatataaatccgccaaacataacgtaagccgtacatggcaaaagcggataaaagcaagtaaaacaaatcccatagaagcatctctttgtttaagttcttattggtgatatgatcaataacatgtcccatcactttgggtggaatcagattgagcacactgaccaaactcagtgccgatattccaattaaatagcggcgcttttcaagcctgaaaaaccaccataaattctttataacagacattattgtcctttctttcattttgacaagaaaaactccctctcatctgagggaaaccttcttttacatttcttttattatataccttgaagccaactctaagtcaagtaaaatgaactttctgaacctacaaaaaattacatacaaaaagcggaaaggtcaagccttaccactttgagatttctgttgataatatgctcttattttcttttgaataaaaaggtgacaataaaaggctaataaaccacctaaactattggtccataaatcatcaatttcaaaaacacgattaacatcgaaaaagaaatcaagaagcagttgtgtgcattcaatacttagacttaggcaaaaactaaataacaagatttttttcttatttctcaagtttggaaagagtaacagaacttgcaaaaccaagggaaaaagcaaaaagatattaacaacattttgaccaaacacccagataagtttcaaaagattggacaagtgccctaaactaaatagtgaattgaaaggcacaggcagtataacaagccgaccaaaatgctgaatgttcggggtttgaacaccccttattgtatgctgaggacaaaaacacatatagcaaatagcgataaaatataaaaccagcaaaagccaagataacttgcgaccgattggttttaactcagctgtttcatcaaaaaaagcagtcattactgagctgttccagcagtcgctttctcacgatcgcgtttcatagtattagaacgcagctgtccacaggctgcatcaatatcagttccatgttcctgacgcaccacacagttaacaccatttttcttaagaacatcgtaaaaagcatctacacgctctttggggctacgactgtactggtcgtgttccgtgacaggattgtacggaattaaattaacataggaaagtttgcggattttcttagtcaaatcagccaattcctgagcattttcagggttatcattaacaccattgagcataatatactcaaaagtcacacgacggttggtcgtttcaatataatattcaatggctgcaaatagtttttccaaaggaaaggaacgattgatgcgcataatgctagagcgcaattcattgttaggcgcgtgaagtgagacagccaaattgacttgaaccccttcgttggcaaaatcacgaattttatgggctaagcctgaagttgacactgtaatatgacgagcaccaattgccagcccattatcatcatttattgtacgcaggaatttgagcacattgtcataattatcaaaaggttcaccaattcccatcaccacaacatgactgatacgttcaccctgaccgcgttcatcaaaatatttttgcaccaacataatctgcgctgtaatttcgccattattaaggtcacgttgctttttgatcaagccactggcgcaaaaagtacaaccaatgttacagcctacctgtgtcgtcacacaaacagaaagaccataatgctgacgcattaacaccgtctcaattaacatgccatctggcaactcgaataaatacttgactgtcccatctgctgactcttgaacgatacgctgtttgagcggattgacaaggaaattttcatttaaaagggcgataaaatcttttgaaagattagtcatttcctcaaaagactgaacacgtttacggtaaagccaatcccaaatctgtgtggctcggaactttttttcaccgtgttcaatcgtccaagcaattaaatcattacgggttaagctataaatagatggtttcatttaacttcctttttccttatcacaaaattattcttagcatcctgaatctctcgcatagcctgacgctcttttatcttttcacgacgaagcttctcttgaagattcattttagcattatttttattaaaacgttttttcctgcgattatcgcgccgtttacgtctttgagagttatcttcttcacttttgatttctttaggattaggattttccaaaacaaaataggcacagccaaaattgcaatattcttttagataatcatccaaataaccaatgtaaggagttttagtttccccttgcatttcctccttatagaagcccttcaaacgcagttgttcattgccccaatcaccaacaatataatcatatttgagcaagatgtctgaaaagcgttgggtaaaaacagtcacatcaaaagcatttttgacattttccaaaagaagcaaatcaatatcatcactcttaacatgattatcaaaagttacaaattgaggaccgggaaacttattgtaattatacatttcaggagtaatgtcttttctcatagatctcctctcaggtatttttctactgtctgtctcagtaaatcaggaaacagcaattgtccttttcttgatgttaggctattaaaataaggagcaaaataatattgatccactaaaacaaggctcattttatcttttctgccaatagccttattattatacactatttttccatttttgtaagtaaaaccactcgttactactttgccgaactgtttaccgcgaaagcccataccacgaatctgctgattagctaataaatctgcttgcgaaaagatatcgtgacagatttctaagagttcagtttgtgtcacttgaaatttgaccagacgcatttgatggggtaaggatttgtgaaggtctgccttagtaagattttgcgaaaaaggctcaacaaccaatcctgtgtttataatagctaaatctgcagcagctgacttcttcattgcctccatcactaaatctgcacactctttcaaacttggttggcgagataatttgcagatcaaattctctgccagcaacttttcgccttcttcaaaaagatgggcaacaaaagccgcatcttctttttccgaatcaagatcactggttggcacagcttcaatagcgatatccgtcaagctatgatcttcaaaatccaaatcaatttgtcccacatgatctccgtaacgccctgccgctgctagataagtgccattgacaacctcaccttcttcaaagacatggtgcgtatgagcgccaataatcaaatcaatttcaggaacttgacgcgctattttttcatctaaacgaatgcctaaatggctaagtaaaatacgaaaatctgctgccgctacctctggattttccaaatcttttttaagactggaaatcgcatcaagaacttgccaaccattaggctcataagtccaatagtaaggaaaagtgtaggccaaaagtgccagttttgtcccagccttagtttcataaatgacatagggctgagcccaagtaggacgtccctttttgtctcgcaaatttcctaagatgacttggaagtcagctttatgataaagctgattgatttcagcctttgctagaccaatgccctcattattgccaatcgtcgcaaaatcaattcctagatcgttcatcaaatcaacatttactctaccagcgctcacatcggtcaaaggatggcttttatctacattatcaccaatatcaaatcttaacacttccctctgtgtttttgaatgttcagcaaaaaaacgcttaatctttggataagcttcaaagtgagaatgtaaatcattgatatgcaaaatacgcagactttctttcattcttttattttaacattttcagctctgatattaaaagagaaaataaaagtcctagaaattctagaacctttattagtgttttcttaggtaatcaatagcctcctgcacatttttaacagggacaatcttcatcttagtgcctaattttttagcagcctgtttagcttcttgataattagtgagagctttgggattttttttcaaagttgccttacttacaggattattgggaacaaaaaagatatctgcattaatcctatctgctgctgccactttcatatcggcaccgccaatatccccaacagacccgtcttctccaatagtaccagtacctgcaataatacgacccttacgtaagtcctctttcactagttgatcgtaaatatcaagggtaaacatgagaccggcacttggccctccaataccatttgtgctaaattcgattttatcatcagaagtgaccttggtatgatcaaccaagccaatgccaataccatttttgccatttgacaatttaataactttgcccttggctgttttcttcttattttcagaagtatattgaacactgaccttgctgcctaatttcagtccagacacatatttaatcaattcttttgaactatgaaaggtcttgtcattaacgcctgttacagtatcagcaatatttaaaacacccttgaatgttgaattcttactaacctgcaaaacataaacacccatataattaaagcttgcctttttatgagctaaagaaagagctttatagatagctccattttgtgaggtttccatataaaactgattaatcctcatataatccgcatcactaacaccaccagttgtttccttggcactggtaatttctgtaaaaggggtcagccaagcatagaggacttgtatgggggttgccttactaagagagacagctacaaaattataagatcctttctctttatcttctttatgattaaccgtcacaacagaacgaatatcataggctccgccgggcatttctaaatagtaaggaagaggaaaaaagaataccattaaaagcaaaataagactgataccgctgattagccaccatttaaattttttgtttgttttcacattttttctccacttcttttacaactccctgcggaacataaggactgatgtctgccccaaaatgaataagctcgcgtatccgactagaactgaaataacgatagtctaaagctgttaataaaaacacagtttcaatttctttagctaattgactattgaaaaaggcgagattagcttcatactccaaatcttgcgcatttcttagccctcgaactaaatgtgtaacctgatgctgtctggcaatatcaactgctaaactatctcgagctgcaacgacttcaacattttttaaatcacccaatgcctctttcagcataatttgccgcctagcaggttcaaacaagccagtcttatctttattataaaaaagcccaacataaagtttatcaaaaagtccgctagcacgacgaataatatccacatgtccatttgtcacaggatcaaaagaacctgcaaagagtccaattctatctgacataaaccgttaccttagaaatcccataaattttttgtttccaaatgcctaattctgcaacttcttctggcagctcaaccgctttatccgtttcacagacaaccataacttcctcagacaaaagctttcgctgacagagttcctcaatggttttcataatttcttcttttgcgtatggtggatctaaaaaaatcaagtcaaactgttcatttaaatctgtcagagcacgcgctgcatccatttttaacagttggaatttatttccttctttagtcatcctgatattagcttcaataacagcttgagctctgcgattcttctccaccaagactgccccagtcattcctcttgaaatcgcttcaatagaaagacccccactgcctgcaaaaagatccaagacacgaccaccatcaaaataaggaccaatcatattaaaaatggcacctctaaccttgtctgatgtcggacgagttgtcttaccttccaaggtttttaaaggacggccgccataattaccggaaataattctcatgtcttccattatatcaaaaagtataacaatttcgtactggcaaataattaagtaactattaaaataaaaaagctaaagagtttgccaccagattgaaagcagcttataacaaggactttcataacattcagcatgtttatagtcctgtcattatttcttttactattctaagtaacagtattaagagtctatcagtatcagccaaccactttcgatccatcgaattaattgttcaattcgatttagtttaagactcaacaacatttaaaatgcaatcttttgtaaaaatactccctttactaactaaatacgttgtgccgtgatcaaaacttatataggctggagatattgaaatcagcaaactcaatatccaattgtgaaatttcctaggagtctgctgatgtctatcatcacttgagcaaagtataaggaaaggcaaactagattgtactttattgtactttgattttaaatcagtataaattattataactaaacttttatgataacaaaagagattagaatacaataatcctaatctccattgagcataaaatgtttttgtactaaacataagtccaacttaaacaagatgataatctttcagtaatttttcaagatctgtccccttagtttttttcaataattcttttagtgcaatcttttcagataaatttaatttcatatctgtaatctttttgccatcacgaagggcaactgctgcatgcaacagatcacggatatcataagtgcttccccaaacttctggaacaccgcgatccacattcaacaaagtataaacagcttccatccctgtccgaatagaatattccgtcgtaaagattgtatctctttttgtttgtgcaaattgtcctaaaaaggcaaaattaacagcaccttgtggaactacatctggacgatctcccttttctcttggcataaagaaagctgtaatatagggcatcatacaaggaacagtcttggcactttttttagccatttcatcaatttctgatagaggaacacctaaatgatagagccattctgcgcatatttcttttcccgtacaatacctcattggttttttaatataatctccttctttgtcagaaaagagcgcataaacccaaacaaccagctgatctttaggttggttatggaattgcggctgacgattgatggtccagctcattaaccaattagaatcacgaacagtaacaataccacctgtcacgatctttcctgagaatggatcccgtttacaaatttcctgaatgtacggcggaatcttatcatccaaagttgtcacggttgcgctcatccaatttgtctgctcaggatcatagcagaatttatcaggatgcccaaaagagggatcttgcttagcaatttgacgccacatatcccaaccaccgccttcacgaatctcacaattaaagactgccgctttatcctgactgccatagcttgaattttctacacagccgccatttgtaataaaaactagatcattttctgtcaagtcaattttttcgccttggccatcacgaatcactgcgatacttttagctgcttttttatctttttgaatatcaaatgtaatattaaccaccttagtattgtaatgaaacacaaccccaaatgactcaagatatttgatcattggcaaaatcatcgattcgtattgattgtactttgtgaagcgcaaagccgtaaagtcaggcaagccactaatatgatgaatgaagcgcttcagataaagtttcatttctaaggcagaatgccaattttcaaaagcaaacattgtccgccaataaagccagaaattagaatcaaagacttcaccatcaaaaacttcgttaatacgtttattatataaatcttcgtctggtgtgaagaataaatgcataatctctttggcccctttatcggacaaggtaaattttttatcagtatgggcatcttgtccttgctttttcgttgcacggcaaagcgaatagttggggtctgctttattgagccagtaatattcatcaagaacacttatgccttccgtttcaatagacggaattgaacgaaataagtcccacatacattcaaaatgattgtccatctcacgaccgccacgcatcacataaccaatatcactgtattgataaccatcacaagcaccaccaggaatgggatctttttccaaaatatgcacttgtttaccgggcatttgtccatcgcgaactagaaaacaggcagcagacagagcggccaaaccagaaccaataatataagccgatttgtgttcaacacctgcaggttttctagggcgagcaaaagcttcataatttccacttgaataatacattctgatacctccataaaacttacctttattgtagaaaaccttcatctcaaaaacaataaacaaaaaaagcaagttgattaaaaatttatcaaaactagctttttgttcaattatttttcattattgatcattagtcttatcatagtgatgaagagctgtcacaatattgccatgcactaaagaatccaagtgtttcacgatgatacgaggatcttctttcatatcctttctaatccaatccaacatcaaaccgacaagagcaaatttataaaagtccgcaataaaacccttttcttcatcattgactttcagtcccttagctttttcattaacaacattaatcattaaatcataggttaaagtataaagataagtttcaatctgctccctgctaactgaatgatagacattcatgataaagggtttattggctatcacggcattaaaaattcgcaataagccttcctcccatgtctcataatctttattttctcctaaagcttggctagcattctcaatacaaacccattcaatcaagtcataaatatccttaaagtgataataaaaagtcatgcggctaatgccgcaatcatctgttatgtcccgaattgtaatcttaggcaagggcttttgtaacaacaaatgtttgagagagtcctctaaagcttttttagttgtttgtgacatgaactaactaacctcaattcaatacattatttttaacccgtggtgctagtttatttagtttattttttagttcacaaaaaagtccattggactatgctgttagtgatcaaacgaacaggagacatccaaatgaacgacttaaatgataccgctaaaagtcatcatttgcaataaattaaaaacgatttccctttactatttttggtctccgaagacatcattattattatagcaatatcctgccgcaagccccacattgatagcaataactcctattgctaaggcagctgctgctccccaagtaaaggctttatcaagttcttcaacagtcccaccccagagggccgaacctaaaccttctccttcggtagtagcaagatattcattgttagcaatttcaaaattgtcaaataccattgaatctaatgttagtgtattcattataaatccttttaattgtactatttaagccctattaaaattatttttttgtgaataagtattgtagcattatacgagcatctttaccataccttaacaacatatacaaggtgaaaactagcccaataagggaaataaaaatttttaccttctcatttgttattgttttgcgtagaaaaaatataataactatagtactcgcatacaaaccacacatcatgatagcattattgggatttttcataataactcctttaaatcaatctgtatatcattgcgtatcatagccattgaatctaaagttaacgtgttcataaggttctccttcttttaaaattatgcggttattataacgcttaaaatttgcttatgcaaggagatttgaaatatttaatgtgaatagtaaccttttgaaaaaaaatccaaaatttctgataattattatctttttcttcaccttctcttcactatccaatcatgctataatgatttccatgacgaagaaaaatctgcttaagggagagcgcattgaccagctcttttctaccgatgttaaaattatccaaaataaggaagttttcagctactctgccgatagtgtcttactgtcgcgtttccccaagtttccatctaaagaactgattgttgatctctgcagcggcaacggcacagtcggcctctttgcctccactcagactaaagataatatcctagaaattgaactccaagaacggctggctaatatgggcatgggccagcgttccattgaactcaatgggctagctgagcaggtgaaggcgagtgaaacctctaagaaaaatgccagccagcactatctcctagcccgataaacagactgcttttaagatcgttatagacttgttctttaatggtaaatagaattttcgggatatttacaatatctttacatttatgttataataatgacatctatttttaggaggttctagtcggaacatgaaaaagaacaaattaatattgctaattattgcagttattgtaactctaggctgccagcattcgccatcatctcattctgataatcatcttttcaatctcacaataacttctgcagcaactacagatactaacaaagcggaaaaagctgttaagaacttagaagatcaccagactagacaaaatttaacaaaggctcagcaaaaagttgatacggtatcagatgcaaataaaaaagaaaaacttcagcatcgggttaatttagttaagcaagcgattacgattaaagaagcacaaacagctgttaagtatttagaagatcatcaatccagagataatatagcagatgctaaaaataaaactgacctcgttacagatgaaggaactaaagcgaatttaatcaatagaattaatcttgtcgaaaatgctattgctgccaaagaagcgccaacgactgaaagtgcagcaccttctcaagaagatcggactgtttatgttaccggcggcggaaaatcacatgtttattggtatagcacagagagtatgccttggaataccaataggaataacattgttgaaatgaaagaatctgaggctatagccgcaggaaaacgacattctctaacagaaccttaaatagaaacaatagaattggaaatgttaaatgatactataactgcccccttttgtatgtaatcaaaggggggcatgtttattattcattggctaagctaaccagctcatcaatcaatggtctgtaatcgactttggcaaaatcggtgacatcaatctcatacaattttcccaaggaaaagtcattgtactgacgatctttgataatctcttcaaatgcttttttggtaataagatcatctgccaagtgacgattggaaagtgtatcaccatgatgaaaatgagtcataataaagctcaaatgtctgtcatcggctaagtcacgcgctatgcgcctttgccacagaacgtcaaaatcggcagccaaacggatagtgataacggaataaccatgtttttgtgataattcttttaattgctttctttgcttaaatgaaaaggggtattctgtcacaacaaattgtttgccaacagccatataaatatttaaggcttcataataatatttccaaacttgtttttctaagatgctcttttcttgtaaattatcaaaaccgatattttccgccaaatcttgtttaaattcatctggagacactgtgtagatttgagggagagccttacgtatcaaatgcaccagatagctttttccagttgctggaggaccggctaataaaataaggtacttattcataatcctatcctacattacttgacccttgcaaattcataaataaaccaattttatgtttgacaatttccttaaccttttgattggctggaataacattgtagcgcagtgatttattaactgcagtttttccaaaagaatctttagcttcttgtgtccaattaaccagcaactctgtaccaacgttaaatttacgaataccattattaattaattcaggatagtctgcttcttttacccctgtaccgccatggacaactaggggaacagttacagtttgatgaatttcttttaataaaggaattttaacatctgttttagacttgaattgaccatgatttgtcccaatagctaccgctaaagcatcaacattagtctcttggacaaaagtaagggcatcttctgatcgtgtataaattttatcatcttctgaaactgaaatgccttcttctgtaccgccaatcgttccaagttctccttcaacagtcacccctctggtatgagcataatcaacaactaattttgtttttaaaatattttctttaaaggacaaattagaaccatcaaacatgatactagaataaccagcagctatcgcatccttaatagcatctaaatctctagcatgatccaaatgcagtgctacatcaaccatattttgattagctaattctttcacaactgctactataacagaatagccaatatatttagcagtgtctacactggtttgaataataatcggtgctcccatttcttttgcccctcgaatcatatctggtaacatctccagattatgcatgttgaaagcaccaatggccatgtttaatttttctgccttatccgtaagttctctcaaagtagtatacattattatttatcctccttcatctattatttggaaagtgttaattttttagcgatatttcgcatttcatccatctttgccatgtaatagtcaatcgcatcgttatctttattgcgtgctgcttctgcacgtttggcattatataaactcattaattttttataacctgctcccatagacaactttttgtctaaactcatttctaagtttgtaatagcagtatcaacttcattaagttctgcataccataaacccatttgttcgtaagattttgctaaatcttcatctgatttctcactatcattattgacaagagcttttccatctgcaatcttttttaaaagttcagcctttgcttcttcagataaggtgatttcttcgacagtttcgactgactttctatttttatcatcttttttcttaaaaaaaccaaacacactattatctccttaattattaaatacctactgctttaaatatcggactaagcagccaagcatagagtaaagccacaactactgtatcaacatcagttgcagttgcattaacaaaacctaattgattaaaggcggttaccaataaggctggaagcagtgtgataaagaagccgtgagcaataccaccaataatggcacctcgccttcctccaacagcattcccaaaaataccagcagttcctccggcaaagaaattggttaacatacctggtaaaatcatagccaaaccaaacattggtaacaagagcatcgcaacaatagtaccaatagttgtcgtaataaagccaaggataacagcattaggagaataagggaaaaacactggacaatctagagctggcactgcatctggaacaatcttcattgcaataccacggaaggctggtacaatttcagccaaaagcaaacgaacaccagctagcaagatataaacacccactacaaattgaatggcttgcatgaaagcgtacataatataattttgtgtccctgtatcaactgctttagatcctgcaaaaacggctgtaaggataaataaaggtaccatgacaaccattacagacaaataagtatcttgaaggaaatcaaatgctttaggaagttcaatatcttcaatggattttttcttatctcctttttctccaaaaagtttagcaataccagcttcaaacaaataaccaatggtacaaaaatgtcctaaagcaatatcatttgaacccgttacttttcgaataataggctgcgcaattgctggcatggcaatggcaaaagcaccaccgacaataccgccaataagaattaagaaaatcccacgtaaacctgcaaagtagccaaagacagttgtcattgttgccatccaaagtatagcctgtcctgtcaaaaaaatatatttccacttggtaagtcttgcaaagatgatattaaatacaaaaatggctaagaaagttaaggcaatatcactccccaatcccaaatcattcatggcctgaccattgatagcttcaatagaaggaacaataccttgggtatgaaaaccaattttaaatatttttccaaaataggttaaacttgtgacgataacactcgaacctgcacttaaaacttggaatcctagtaaggtcttaagcgttcctgaaataacttggccagttgatttcttttgcaaaatcaatcccaacatagcaatcaaagcaatagtaatagctgcctgagtcaggatgttattaatcataaaattgataacactcattattttatcctcctttagataaggtttctatcctgtaaaacgggaatcagtttttcttcaatttcttgactggaaacaatattttgtaaataaataatagcggtttgtgatgtgtcaatatcaaaattcgcaaattgtttttgaaaattttgtgctgtaataataacctctggttgtaccgatgcggctgtagaaatatctacatgatccaattttgcattaatatgatacttggccaagacgtcttcagcagccatttgcgcagcaaagctactacctaatcctgcaccacaaacgaataaaatatataatgtctttcccattatgaatcctcctttgaatggaataaaatagttttaactgattggacatctttagcagtgcatagttgttcaatcttatcgttcgctcgaataagattaactaaacttttcataatattaagatgtgaaaaagaatcaactgctgttaagcaaaatatgacttgaacttgctcattttcttcttctccaaattgaacaggcttttcaaaaatagctagactcaatcctaactgattagcaccatcctcaggtctagcatgggctaaagctaagtgagggccaataataatataaggaccatattgctcaacgcttttaatcattgcctcactataatgcttggtcacaatgccatcctcatagagaggagccgcaacaaatttaatagcatcgcgccaagtgtattctttatccgtaattaatatgtgttcatcacttaaaatatcttgaatcattggctgaatctcccttttattaatggttaaataattctttaaaaaaatctcctctacagcaccatacaattttttatcaactttaccatcaatctcttccattaaattgagaatatctaaaaacacttttgtgtaatcctcatgttgctgcgtaactcttcttgctttatggttaagatgtaaaaaatgaccaatgcgtaatttggtatcctcttggataatagaatccagaatcaataccggcttgcctttataatcgatatcaactgtcgaaaagaccaagtcaacatctaatttatcaataatatctatttctcgagaatttaaaattgcaaacacttcaatattaaagaattctttcaaattctccgctaacagttttccagtagctgttccatgattacaaacaacaacagcgcgataccaatatttattttcctgattaatttcacttagagttgttgaaaaataaattgtcaaaaatgcgatttcatcatcaataattttcctctttaataatttttctaaatggaaggaaaacttagcaacggcttgatagatactgccatagctttgttttattctttctgttaaaggattggttagctgaatattatttttgactctggcgaccatactgaccatatgctgatataaaccttgttgtaagatattatctttcatattaaaaggtatctctgtttcttgttcaacaaaatcaatcagttgaatagttaaaatttgcaattgaacccaattaataggactatcatcattctttgtattgaatgattgcaaaatagcatggatgtattggcattccactattgaaggctctattgtaaacatttgacaaattgccttcaaatagccctcaatagacttagaataatggaactcttctttaggcaattcttcttcttgcagtctacttttttgtttaactctcaagagccaaacacaggtcaataaaataaaatgtgtcctgtgaatatcatcagttatggaaaagatagtttgatcaaaaatcttatttacctttccaatcatgtcagcggaaatataatgattaatgatacgatttttacggaaattaaaatttatgcccatcttactgatttcgggactgagcaggctatagagcatgatacgaatggaaatttcacttccttctaggatcaaaccttttttgggatgactgacaatatcaatatggtaaaaagataagcgctgtctaatttgtctcatatcttcatccatcgtagattttgaaaccttataaaacttttctttttgatataagaaaatcttctgtttacctaaggcagcatcaagtattaagtctaaaatacgctcctctctttcaagataatctgacttatcctcgcttgatagctcactttttagttttcttccttcttcatcagttaaggttaggaagaagccttgtgaacgaatactttggataattggtaagtgaattgatgttaaaaaatcattgatggttaaaatatcatttcttatagttctagaacttacattaaattctttttgtaagctatctgtttgaacaggtaaagttgacactaaaatgcgatttaaaatactgacagaacgttctttcatcaatttcttactcctttcttacttattagtataagatgaatgataagtaaatggtagtagatatttttgccacttttaatggcaaaaaagtaagctactttcatcttttgataactaaaaaagcccttatagaaccagatttcgattatttcatcttgaaattcgattcttattaggcttttttacaaacttttcttgacttgattaatgagttctttagtcatgcgacgtggaccgcgaatattggtaacaccatattttttgagacgctcgatgggaaaattgccgtcatcatattttttcaacaattctagtctcatcttttttttatctgaatgccatccttctatacctgcttctactacccgacaagcatagcgcaaggcacgcgttggtgccgtaatgtaaataaaaagataatcacctgctttaatactggccttttgaggccattcaactatttggtagcttgcaaattcggcatcaatgtcataatatttaagattagctggaataatccagtaatcaggcccatcaggattccctagggcctttccggcagtcaaagctctgctattgtccaccaaagaaaaaagaaaattatcagaaacctgctcatctaaaacaagagaaatccaagatttcttgttcatatgataagaaggataaataccagaaatagtaagtaaacgagacatatcagcaggattgatcttaagattgatgatttctacctgctgatccaattcttctttctcccactcttcctttcctaagtctaacttaccacgcgcaatagccataatcagtgcataccatttgtgattatccggatgacgataggaagaaaaagctggatacttggcaaaaggatggtcacaagcatcaccatatttctttgcaatatattgggccaaacggttggtttgatttttaataaaaggcagagcttcaaaacaagcatctgcaattcgacttaaaatttctgtataagcttgtcgaacctgaccaacaaaagttcctacctgtctttcgacacgcagtgcaagataatcatcatctgtatccctatccagtactcgacctgacacctgtccagactcagaaatcttaacttgagcttcaaaatcacctgccataaaaatttctttatagagatagtcctgccctattttaacaaaaccaaaggcagataaggtctcaaaacgaacgcgttttttcttaaaaaagtcagattcaaaagacatggcaattcctttcttatagcccctattataacaaaaaatcaagcagcaaaaaccacttgatctctgttttaaattaaaacataatcttcaatcaccttggaaacaccgttgtcattgttcgataccgtttcaatatctgcttcattcttaacagcctgaggtgcattggccatagccacccccaaacctgctagtttaagcatgggaatgtcattgtaattatccccgatagccatcgtttgggatagggaaatatcataatattttgcaatttcaagtaaggcattttcctttgatacggactgggaagtgacttctaaataattgtctttcgaaaggtaaaaagaagcatcttcaaaattcactcgtttaaggtaagtaaagaattcttgaatagcctgtgcattggcaattaagagaagtttgtgaataggaatagcgtcatctgtaagcagggtatcaaaattcctaatatcaggactctctttggtaatatcagcctcaatctgtacccattgatctatctcttcaacaatccagtcaccgccagaataaaaattaatagaaatatgcggaaactgcttcttgattaaagccactatttttttaacatcagctttactgagaccgtgttcaattaaggtttgataatgttctttatttccctcaacaatcagagccccattgtaacaagcaatgggattggctcctaagttaagctcttgtgcaataggaaacattccatggggcgatctagccgaggctaaaacgaatggaatagattctttttttaactcagtaatcgtatcacgcaaatgggcgtctacctgatggttattatctaaaatcgtaccatcaatgtcacttaaaatcagtttaattgtctttgccataacaaacccctttaaaaaataatttcgaccttatcagataaatttgcccgtatctttttactcggttttttgtccgtaataaagtaatcaaagtcattgatagatgccaaaacgtaattggagtgcttagcaaacttatccgcttctgctagcagcactttaactttggcattctttaatactagcttctttaaatacgtatcagcctcatcttcaaaagaaacttgcccccctttaagaccggcagcaccaataatagccacatcaaaatgaatatctttcaacaattccgcttcatttaaagcataatagaaacgatttttacgatgaaactgaccgcctagcaaatgaaagtcaacggtttcatgctgagccaagaccaaagcattatccaaagaatgtgaataaaccgtaatgtccctatcaataagctgagccagcttgagaacagatgtcgaaacatcaaaaaaatataactgaccttcaacaatcaattggtaagccttctgagcaatctcatttttctctttcatcaaattattaagacgctcttcaaaagaaagaatcgtttgcgatttctgcaaaggtaaaatacccccatgtgtccgcaaaacctgctttctctccgtcaaaagagcaaaatcacgacgaatcgtatcgcgcgaaacagctaacagatcaatagcctctttcgaagatagttgtccttgcctatcaagcaattctaaaattttttgcaatctttgttcttgatacataactttcctcttttcataaattaataataacatgatttttaagtaatcgcaagtattcttaagtatttgtatgtaaaaacacttaagaatacttgcaaaaccttatatttctataccttttataaaccctataatcaaaaatttccttaacaaatagaactgccaagttatttctttgcttaatatactaaaaaagccaacgttcagatgttggttttttgatttagataacattagcaaaagaggaataattgcttatgaatttgatgacttatgattactcctacaagttttacaccacgattgatttctaatattaccttctcccatatttctatacccaaaatcacttaatggcttttcttccttacagtgagggcaaggtcgagtcggttcacttccattgtaatcagtagcattaattattacgtttgtcattagtttctctccttacattatattctaaattcttaccaatgaaatgatcaaaattttaacctactatcaaaagatatcaattagtttattcaagataatcatttaaataatccgattcaatcattttataattaaaaactttaccaatgtatttcatggcttccattaaatgcgatttatcactatcccaacctttaccatctgtaatgtaaatgaactcatgattggttctactgaatctatcatgtaaatctttaaattcggttgctgaagccttggatttagagccactagaattgaaattatttacctcaaataaatataatttcttccttacaggattaaataatgacccgtcaaaacgacgattttcaaaacttttatccaaatcaattccataccaatttttgatactgctacgggttgactgcccatgagctaaccaggccttttctttagcaatcttttttaaagccgtttccaaatagagttcccccatatctccacttctattttttcgaccattagagtccataccagcctccactccaacagcataatcatgaactgactttcttaatccaattttgaaaacccaatctaaaccactgtcatgaatgaattgaagatagagatctagtttactcaaatcaatatctttaaaatttaaggtataaacacctgagacatcttgaacttttaaaattctatttcgaatcggtttttcaaatttactatccctaatccctaaaagtttagggactaacaataataagttggggcgttttttaaaaaaattgtcaatctcttgatctgattttccaattaaataatccaaagtatacaaatctggctcatcatagtttgaaatattagctttaacattatcaaaatcaaaccagtaagaagcaagaaaactcaatgatgaacgcgtctccatgaaaaactctaattttgcctctgaggataaattaaggtaatcaaaaacactatatttcaagttgtcatcaacagtattgaccatctactctctccaatcttgtacgtgcaattcttaaatattctcgttctgaatcaatgccgataaatcgtctaccaagctttttagccaccactccagttgtaccactcccgacaaaaggatctaatatataatctcctttcttagtgctggccaagatgattcgttctaataaatattctggcttttgagttgggtgtttcccagcccatttttcggactttttagttagacttcccgtccagacatccttcatctgtttaccatcattgatttttttcatcaaatcataattataataatgttttgattttttatcatttttacgtgcccacagaatagtttctgttgaatgtgtgaaataacgacaagatagatttggtactggattagttttctgccaggtaatattatttaaaattttaaatccttcttgttccaaagccataccaacagaataaatattatgcaaacttcctgatatccagatagttccatttgacttcaaaacctttttagctagtcttatccaacgacgattaaattcatgtttttcctcaagagaagcagctttgtcccaatcacctttatcaactgaaaccacttgaccacccgaattagaaaaacctccattactaagaaaatatggcggatctgcaaatatcatatctatactttcagatttcatcttttctaaaaattgaaatgtatcagcatgaactaaaatagttttatttttgtaatagtatggctttgtcataaaaatacccccatacttatattcgttattcatcataattagttactataatttctttgattttttttcgactttctgtttttgcgccatttgttcttactgcatctacaaaatgaatattataatcttgatacaaatcaagtgctaagggactagacgaatttgaaagcatcacataaataccttttctattcagctgttcaaatacatttcttaatcttagttgttcttcataagtaaaaccttcatgtgtataagatgtaaacgaacttgtttcatttaacggaatatagggaggatcaaaataaacaaagtccccttttttagcattagaaaccgcttcttcaaaattagtattcaatatctgaatatcattttcatttaaatagtcacttatttgatagattaattcacgatcaataattttaggattcttatatttcccataaggaacattaaattgattttttgaattaacacgatataaaccattaaagtcaactcgaagcatatacatcaagcgagcagccctttctacatcagacattcttgtaatcgtttcattacggtctgcagctctaacttttaaataatattccttactatttttttctttatgctctgttaacagatcaatcaatgcagtaggattatttttaatttgtctataggtattcatcaactcttcattaaaatcattaataacagctttttctggaaccaaatcaaagaatagagctccaccaccaataaaaggttcgaaatagcaattatacttctctggcatataactgcgtaagattggaagtaattgcctttttcctccagtccatttagtaaaaggttgcaaagtagtatttgctaattttatctgttctgacattctatttcctttataataaattctgtgactattatatcatattacattttttagatttactgtaattactattgattttataaatttcaatgcatctctctcaatactactaactttttttgttaattcaaatatcatggtatagaatcattcattttagggaacaaaacattacctttatgttacataatcatttcattttatcttgacaatacgtaatattcgtaatattattgttacagaaaaagaaaaggagacttctattactatgacacctaaaaaaatcaaaatagctctaacagctcttatctctttgatgctcgccttatttttattcttgtttaatcaccattcagtaagagaaaacagtcagcaagaaaagttaaagataagtaaagcaagttctaaaaaatcacaaacaagcacttcttctgttatgacaagtagtcgaaaagctactgaacaaacaagccaagcacagactcaaagtcaatcacaagcagaacaaagtaaccctaatgtgatcctccccattccgcaagaattagtcggcacctacaaaggttcgagtccacaagcatctgaaataacttttaccatttcttcaaatggtcaattgcgtgctcaagctaattttgatcctgcttctgatataaatgacgttaccgccactgttagtggtgttagaaaagtcggggcagatacctatatttgggagtttgtctctggtagttcagctgctcttttaccgggtgttacaggtataggagggcttggaaagatgcagcctggtttcatcctaaaaggggggcaattaacacctatcatgtttacaggttctgtagatggtgaaattgattattcacatcccaatccctatccagtatcattaaacaagcagtaaaggaaaaaataacaatttactggtaagagaaaaataaaatactttaatggattcattgaaaaatccattaaagtattttttagtcaactgtattttttgtactaagaacacttgatttaccattgtcagaagttatgcgatagtcttcataagagttataggaataactatcactactatttttcttattgtcaccaacatattcaacaagtgcagaccaagagagtttttgagtaatgcttcctgaagatttgtgctcagaactataagaataatagaaatcataaacaactgtaaattcgacagcataagttgtcggacttgtctgtgttaccttagtaacatctacatcactaaagttaattgaatccgcactgcgatttttagcattggtcgtattagtatctatagtattttttacatctaaatagaaattgttatgattaccgctcgtaaaaatgtcatctaaatcatcaggtgttgtatgagaagaagcataggaatccaatttgtaataggcttgtgtaatcaatgaatctgcggtatcacggtcaagaactcccttagcatccaaactaatggtatccccatcataaacgtcttctatcgattgtacctcagattttaatgttgctttgccagaaaatgatttttgaacgtaaatttttgaggtatctgtaacagcaagcttagtcacattatatttgccatcttttaacgttccaattttgcgactgcctacatataaatcgccgtctgttagattactatttactttgaaactaagatatttaacatttaagttaatcgttgaatggttggtaagcttttcttctgatgaaacttcaaccttttgtccagatatatttcctttagcaacaaagttataggttccaggatataagcgagatattgtttgactaaaagaatcactgtccgcttttgtgacccttttatcattaataaataattcaagtccctttgtattaattgaaatttttgctgaggctggtttgatagctacacgccaatcagggaaaatgagaaacttattgcctacttttttcatctgactagcatcagaggtaagcttatccattgtgactgttctggtttctttagaatttctataggttaattccgattttttgattggcttttccgtatcgctccacacttcaaattctaaagctttatcaaaattactattagcaactttcaaatatctctgtgcaactgcttcacgagaaaaatactgatttccataaatataaccgacaacaagtgctaacaagcaaaccagaccaagtgtgattaggatttttttaccttttgtgaaaggtgctttagctaaatttgatgttttactaactgactctttttcaaccaattgacttattttagctaaatcaaaatcttgatttctaccacttataaattcttcaggggttggctgacgtccaatagttttttcaaaagcttctacccataattgcttaggtgatttatccacttcagtagaaactggcttatctgtagattttgtctcctcttttgaagactcattatctggctttactgctgtaatagaattacctaaaattgcttgcttaatatctgaagatgtttcttgcaaatcatctgctttatcaactcctgcaatttttttaatttcttttaaatcaaagaaacccttctttccttcaagaaattcttgcggagttggtttgcgtccaataactttttcaaataattctgtccatttttctttacttgccataatttcatcctaatcagttctaaaataattttgctagagagtctttgaggctatctaatccatgtaaaagatttgatagcagcgatttatccataaagaaaataattaagataaaaacaagaaatgatatcaacgtaacatagaaattatttaaagttccaatagaaaccttgatattttttaagaaagctaccaataaaacagctaaactaataatacttaaaatcgttaaataaacacatactgtttgaatagaatgaatggctggaacttctttgattaaacgagaaacagaagacaaaccttcagaaggactagaagcaactgtttcaaatgaagatgcaatttgataggcatatttacttgaaaccactaatttatctgatgtgaaaaaactgacaactaaaattagaaaattaacgactgctaacaatggtgtataagcaacatattttcctaacaattccgtcacattctcttgagattttgaagtaaatttgttaatgaatgctggcaaaacagccaaaatggcataagcaaggaaaataatgagagtcacaacaatgactttactaaaaccaaaattggtacgaatggcatcttcaatcatagaaaaagtctctggttctttgagctttagactctcaccactgactgtcatattaataatagaagtaaagattctattgatataattgaccagaccagctgctaaaagaacagcagcaagaaagagtgtgattaaaccataaataaattgactatttgaagactcggcaacaggatgcttcaaaccttctaaaaaccaacttaaataatttttccccttttcttttaactgttctacctgctgcttagagttagcaatgttatttgaatgagcaaggggcatttgttctttaggataagcaatcggatcagccccaattgatgaagcttctttttcttctacaacttcagcaaccgtgtcgttactactgctttcttcaaaagcaacgtctgtagtagcgtcatcttgaaattctcctatggctaaagcctctgcaatctctttagcagacggctcacgaccattaatggcttcaaaataatccaaccaatcctctttattcatttcaatctccttctctgaatattaaaaatattacaaaataattatagcatgggaaacttactctgacaaggctataaaaaaagccaacccacttaatgaattgacttattagtattaattctattattttgcttcaataagacccaaattaccatcttcacgacgatagagaacatttgttgtattatcattagcatctgtgtagatgaagaaatcgtgacctaagagatccatttgtaaacgagcctcttcgatatccataggttttaaagtgatgtttttggttctgacaacctttatagctggagcctcttccatctcttctgcttcaaattcagctgtaaagacatgtgccgctggtttcttttcacgatgcttcttagcaattttagttttatttttacgaatctgacgttcaatcttatcaacaactaaatcaatagaaccatacatatcttgtgaaacatcctctgcacgaagagtaacgggagcaagaggaatagtgacttcaactttagctgttttctcacgatatactttcagattgatacgtgcatccaactcttgttcagcattgaaatacttttcaatcttcttgagtttagactcaacatagttacggattgcatctgttacctcgatgttttcaccacgaatactatatttaatcataagttacctcttttctcgcgcttaagcgctttcttcattattattatatcgctttcatgaaaatttgcaagttttttattaccttgctaaagaaaaggattttattgttttcacaccattttcacgcaataattgactggccaattgaattgtcatacccgttgtatagatatcatcaactagcatcactttatcaggtaattctttatgtttccttaaataaaagttttgttgagtctttaggcgttcttgacgtgttttacttgattgttttacactaccatcttctttgcctaataaatcatgataagacaattttgcctcatctaaaaaagcttgcacttgattaaaaccacgattctctaaacttgaagagctgagtggaatgggaaccaaagtataattagtatactctcttaaggcttctttaataggctttataaagacctttcttaaaagataatccccttgaaatttgtaagcactgaaataatctttcatagcttgattgtaacaaaagagagccttgtgatgaacctcctttttgagattttgccatttgtggcaatcttgacagatatctccttctccctccttataacaatttaggcaatgtttttcagatatgaattgaaatttcgcaaagcaaggtgggcaaacaaaatctcttgaagttttcaagaagaaaatagaatagaaataatatttactctcaaaaggcaagtgacaaatgagacagttcatgcaaaacctccttttttgttcatagtcttgatttccataatggcctttttcatggctctgttcattccattatgaaagaaaagtaattttccatctggtctatcggcagagcgtcccacacgaccagcaatctgtaccagagaacttttggtgaacagataatggttgctcatcatgacaaaaacatctacacaaggaaaagtgactcccctctctaaaatcgttgttgaaaccaaaatttgtgtgtttccttttctaaaattttcgactttttctaaacgatctgttgtcaagctggaaacaaaatcaattttctcatttggaagataggtttgcagtgatttagcaaaggttaaaccatcttcaatattcggaaaaaagatcaaaagagggaattgagtctgcctttgaattcttatctgctgtaaaaaagagcgcggtaatttacctctttgtaatctttcaagagataaattcaaccaaattggcttgggaacaactaagggattggcatgaaatcgtctggctaaatgcagtttttttagcttcccttgcttaacctgtttgtctaattggtcagtcgaagttgcagtcaaaaatactttgacaccatctgatttcagacaatgatctacagcataatagagcatcttattgtcaacaaaaggaaaggcatctacttcatcaataattaacaaatcaaaagctcggtaaaatttcaaaagttgatgcgtggttgcaatcactaatggactgcgttcataagcttctgactctccatacaaaagactgataggacaagaaaagtcacgacttaaacgtttatacagttctatgcagacatcaatgcgaggactagcaagtgcaaccgcacccccttgattgagaatgctggccagagtttcataaatcatctccgttttgcctgcacctgttacagcatgaataagcatattttccttatggcaaacactcttttttaaaccacgggaaacttcctgctgaaaaggggttaattgcccttgccaccttaagacctgaccctttggaaaaggcttttgctcaaaataataaagactgtccctgttagtaagacgtccaaagacaagacaagctcgacagtagatagatccatccggcaaagcattaccaagattgttctgactgccgcaacgattgcagataaagtaatgcggtttttttatcatagctggcaagattttagcttgctttttcaaatcactgttcatttgattctcggtcaagaggcggccataataattctctaaattctccatcacctttcttattcgtaaacaaataagaagaattgacttgcagcttttcaaaaaaatgtgtacacttttcctatgaactatcgaacaatcgccaaaaacggcagcactgaagaaactattaaaaaatcacgatttatttgtcaggcaaaaagaatcactaatgaagcagaaggacgtgattttattactcaaatcaaaaaagagcattacaaggcacgacattcatgctcagctatgattattggcgaaaacagcgatatcaaacgatccagtgacgatggtgagcccagtggaactgcaggcatccctatgttaagtgtcctcgaaaaaaagcaattgacaaaccttgtccttgttgtaacacgttattttggtggcatcaagttaggaacaggcggactgatccgagcttattcgggtggagctgctaatacgctcaaagctttaggaatcgttgaagtcaaaaagcagacaggtttgcggttggaattaacctatccacaatatcagacctttgctaatttcttgaaggaacatcaactgcaagaatatgataccgatttttcagtgactgttaacactactatttatgtggataagaaagatattgagttcacccttgaccaacttactgagttttatcaaggaaaacttaaaagccatgttgctggtaatcaaattattgaagttcccgtgatatgatttccttatcacggtgataaataatttatattttacaaagcttatttttcagcctatactggaaacatattaaatttgtgaggtattatcatggcaaaaatttataacaacattactgaattaattggcaatacacctattgtaaaactcaacaatgttgttcctgaagatgcagctgatgtttatgttaaacttgaagctttcaatcctggttcttccgttaaagatcggattgctttaagcatgattgaagatgctgaaaaacgtggtctcatcaaacctggagataccattgtcgaaccgacaagtggtaatacaggtattggactttcatgggtcggcgctgccaaaggttacaatgtcattattacaatgcctgaaacaatgagcgttgaacgccgcaaaattatacaagcttacggtgccaaactcgtattgacaccaggaagtgctggtactaagggtgccattgacaaagctcacgagattgccaaagaagttggtggttgggtgcctctgcaatttgacaatccagctaatccaaaaattcacgaattgacaacaggtcctgagattctggaagcatttggttcacatggacttgatgctgtcgttgctggtattggtactggtggtacgattactgggatttcacgtgcccttaaaaaagacaatcctgacattaaaatctatggattggaagctgatgaatctgctgttttgtcaggtgacaaaccggggccccataaaatccaaggtatctcaacaggctttatcccagctgcattagatactcattcttatgatgaagttatccgtgttaaatctgatgatgctttggctactggtcgctacttcggcggtaaggaaggattcctacttggcatctccgcttctgctgctgtctgggccgcacttgaagtcgctaaaaaactcggtaagggtaaaaaagtcttggctattgcacctgataatggtgagcgttatctttcaaccgcactttatgaatttaactaagaaacctgtaacatttatgtcatgctgaccttcaaagttgcacagaaagaaaaaaacaaaagagtatcatttatataactccctttactgtaaacagcgaagaacaaaacttcgttaaaacacaagaaagggagctttcttatacccaaaaacgcgaaattagtctacctcaaacgttttccaacacaaaaaataatctgattcctcttgcatttaggaatcagattattctctcaagcttttattatatcactgtctgcttgtcagaaagttatttcatttaatcttttctttttcgtcttcagtgccattaattggtaaatatttcgtttattattttaatgatctagtgtactgatctactgctaagagtgcattggcaacatcacctgccttaatttcaaatggcatttgatgaatcgtttcgccttcaattgtagcttgttggccaatctttagaagttcagaatagtcagcatctcccaagtgcatttcttctaaagtcgttggcatgccaattgctctataaaaatgaatatacttatcaatttcttcttttggacgattttcaagaaagagttgcgttaaggttccataagtaactttttgaccatgtgtcagatgatgaatatctcccgttaaggctgtaaaaccgttatgaatagcgtgagctgcggccaaacctgcactttcaaaccctaaaccacttaataaggtattagcctctataacattttcaagtgctcttgtcactacttttgcttcacaagctgccagcgcttgtagaccatctgcaaataaagtacgctcacaggcttgggcaatagcaaggctagctaaagtttgccctgcaccagtcattgtttgcccatttttttgaagcacagctcttgcttctacccaagtagcaagtccatctgcaattcccgaagccagtagaataactggagatttactgatgacttcagtatctactaaaacaagatctggatttttggaatagaaaatgtatttttcaaaagcaccttggtcagtataaatgacggacaaggctgatgttggagcatctgtcgaggcaactgtaggagcaataataacaggtatctctaataaatcagcaatggctttagcactgtcaatcgtctttcccccaccaagaccaataattaaatcatttcccttttctttagctatagcaacaacgcgatcaatttcgtttattgaagcttcaccattaaaggctatacgatctactatcaatccttcttggttaagataagtttcgaaacgtttaccaacaatatcataaacgacattgtctgttaaaaggataggatgagaacccaaattaataatagcttttgcattttcaaataaagctttttcaccctgaatataacgtgatgggctggcaaaaattttcatcatgaaacctccttctaaagcaaagtccttttatttttttaaatataaggacgtccttgtgtgctttcccaatctgctgcaaaatcatcaacagctttttgaatggatggattggcaaaaccagcagcaaaaatatctgcaccagcagtaacggctttagcacccgctgctaaagccttggcaacctgagtaacatttttaaagcttgctgccaagatttttgcagaagcttgttgacactcaatagcctgagcaagttgaccaatcacctcaattgggtctatattaagattttccatacgattatagtaaggggcaagatagtctgcgccagcttcaatggctaaaaggccttgaaaaactgtataaatagccgtagcagtgatttgaaatccttcttcttttagttgcttcatcgctgttaagccagttggagagacaggcactttaacatagagattgccgccaagttcatcttgaagtttgtgggcatctttaataatcccttccacatctgccgcaaccacttgtgcatgaatacttggttcttcaccaataatggcacgaacccttttcacttgctcaaaaaaatcaatttttccttcttttttagcaattgatgggttggaagttaccccagctaatggtaggattgctgcccatttttcaatgtctgctaagttgagtgtatcaagcataaattccattttcttttcctctttttctcaaagtgcatgttctgtacgagcgataatatcgtcttgagttgctttagaaagaacattgaagaaggctgagtagcccgcaacccgtacaatcaaatcgcgatgtttctcagggtgcttttgagcatcaatcagagtttcacgagagacaacattgtattgaatatgatagccatgtaaacgattaaagaaagctcgaagaagtgcaatgagtttttgcttatcttcttcttttgataaggtttgtggatttactttttgattgagaaggacacctccaacaatttcagcggttggtaatttagatactgatttgagtaccgaagttggaccgtttttatccatattatgggatggtgaacagccctctgcaagcggtgtccctgcatgacggccatccggagttgctagtgttccacgtccttgaccaacattagctgaaatggatgatgttcctgaataacgaataccaccgattgggcctcgaccatagcgtgtatttggatatttagcgatttcatcaacataaacatcgtaacaatcacataccaattgatcggcataatcattgtcattgccgtacttaggagcgtcattaatcagcatttgacgaatttctccgccacgttcaccagcataatccgattgcaaagcttcccaaagttcagctgttgttaagcgtttttcttcaaaaactaattttttgacagctgcaagagaatctgaaaggttagcaatcccaacttgaagtccagaaatatagtcgtaaacggcaccaccttcttttaaatgtttgccacgaccaatacaatcatctgtcaaggcagaacaaagaatatctggaacttcccgttccaaactgaggtcaatagcgttttcgacaataacactcatacgcgtcaaatagcgaatcgtcttatcccatgcagacttaagatcttcgtaagatgtcatatcgacaaaatgcccaaattcaggcgcaaagcgtttgccagaagctggatcaataccattgttcatggtaataagcaatattttaggaaaattcatataactcatacccgtacaacgatagccccatttgccaggaacagccgtttcaacgcagccgattgctgagtaatcgtaagcgtcttcttctgccacacccttagcgatgaatgatggaataataatttcatcattgttaaaggccggcatcccaaaaccaagtttcatgacctcaatcgcctcattcataaaatcagggttgagaccagcatgataacgaaccgtcaaatttggctgtggtaaatgtgtctgcgcaacagatttcaaaacaaggaaagataaaggattaactgcatccttcttagcgcgcgtctgacctccaacagtgacattttgataaagcggtgagccagcagatgaaaaagtatgtgcttgactgcgaaccttgttgatggtaagtgtcttaatccataaattggtcaaacgttcaacaatggagtcttccgtttcacgacctgcttctaaatctgctttaacataaggatacatgtattgatcgaaacgcccgtaagaaagggaatgaccatttgattcaatttgcagaatacattggatgaaccaaaccgattgcacagcttctgcaaaggtgcgtgctggataataaggcacccgttcacaaatggctgcaatctccagtaattctcttcggcgcttagccgctgcagtttctgccatctctttagctaaagttacaaaacgttgggcataagttttgactgcgtcaattgtcactaaaatagaatcataaaaatgatatttatcgatactagctgggtctgttaagtcaagatcggccttagcttcacgtgtccgttcttcaaaaccgacaagtcccaattccagcaacttttgataattgactgctaaatgagcatcaccagaattcatcttgccttccataccaaagaagcctgtttccatatagacctgtacttcatctgggagcatcgcacctgcacgagcacgcaagttattattttcccaaaaaggggcaatgtcacgaatctgctttttggtttcttctgtgatatagaaaacgtcaccgtcacgcttttcaaagaggtccaattcattcaaaacaaattcgagtgtatattccggaaagattggagcatctttatcactagaagcttgatttccaacaatcatcgtctcatcatcaatatagagcgacattttttctaaaatgtttttaagcatgtaagccctcttaaggacatttggtttttcttgatgttctttataagcttctgtagcaagtatggcacgttcggcatcaatataaggctttttatcaagtaccttatcacgataactgtacatgcgttccgtcaaataaccaaagtgtttttgagaattcttttgaacatcatttgtgtacttttgagttaaaagcggaattaccattctccttctcctttttatgttcgtaataattatattttctttcgaaactataataacaccaattttaataaaatgcaaccatttttcataaaagacagtctgtatttaaagaaaaagaccagtttttacaaatgaaaatactgatccaattttaccttttattaagaatttacagtcaatatcataaagacatgtctccttacgaataactgttttttcttgttattcacaaccgtctcatatcatgctttaattgaccaattttagattaatatgattagctattaaatgctcacgtcttgcttctgaaatggcagaatctgttatgacttgcgaaacttgactcaaagtaaattgattgaccaaactacgcttagcaaatttacttgaatctgttaagacaaccaattcatcagcagattcagccatatattgaacaacttcacatcgcatcatgtcttttcccataaaccctagctcatcgtcaaagccatctgttcctacaaacaacttttcaacatgaaatagcttaagtatttcttttagcaaggggccaacagttacttcagaattaggttgataattaccaccaagtaaaatcacttgacaagaatcatactttcgaatgtaagttgcaataaaacaagaattggtaataattttgacattgcgtctactttgacaaatagcttccgctaataaagcacaggttgaacctgattcaatcataatggtttcattatcacgtaccaattcaactgcctttgcagcaatacgctttttgatattatagttgtaagaaagcctgacatttaagtcatcaccactatttaatactgcataaccgtgctcacgatgcagcaatcctttgctttccaatttatctaaatctttacgaatagttactttcgatacgcctaatttttcagataaggtattaacatctatttttttctcctgagaaactaagttaataatctcatctaaacgtttcataataatcacctctagatttattttaccaaatagaatataaaaaataaagccaacagcattacgttcgtaattgattttgtttcgtttctctggtaaactgattataagttgaaaaaagaaaggcaaaaatatgactagcgaaaaaggaattatctttaatatccagcatttttccatccatgatggccctggtattcgcacaactgtgtttttaaagggttgtcccttacgctgtccttggtgctctaatcctgaatctcaaaaatataaacccgaacaaatgctggatgccgaaacaaaattaccaatgatcataggggaagaaaaaacagtggaggacatcatatcagaagttaaaaaggatattgatttctatgaggaatccggaggtggtctcacgctgtctggtggtgaaatttttgcccaatttgaatttgccaaggccattcttaaatgtgccaaagaagaaggactccatacagccattgaaacaacagcttttgccgagcatgaaaaatttaccgatttgattcaatatgttgattttatttatactgatttgaaacattacaatactattcgacatcgcaaagtaactggtgtcaataataatcttatcatccaaaacattcattatgcctttacgcacaaaaaaacaatcgttttgagaattcctgtcattcctgattttaataattccttagatgatgctgaacactttgcaaaactttttaatgatattcaagtagataaagtccaactgcttccttttcatcaatttggagaaaataagtacaaattcctcaatcggaaatatgaaatgtccggctacatagctcttcatccggaagacctttatgattaccaatctgtttttctagaacatggcattgactgttatttttaaaaatataaaataaaaaactgcatctttaagttttggatttttctgtccaacttaaagatgcagttttttaacgaacacttaatccttagcttgattatcactctcatcttgatcctttttcaaataatcaagattttcttcaacccagattggtaaatgttcttctaaaggtttaaaaccaatatttaaacgattattagaaaaacgatggcgatgttggtaatgatgtttttcttcttccaaagttcgcaaagaaagactggctttttgactatattcatcataatcaacgacttgaacaagaacttcttgaccaaccgataatgtctgataaatattatcaatataacccgttttgatttctgagatatggatgagaccaattgagccattttctaattggacaaaggcaccgtaaggcttaattcctgtgatttttccttttagcttatcccctattttcatcatcaatcacctcgatgctctcaatcacaatgtcatctataggtttatcagcaactcctgtatcaacattagcaatattatcaagagcttcataagaagcttgatcaactagttgaccaaaaacgctatgacggcggtcaagatgcggtgttcctccattttcggcataggctgctgcaatttccttaggccaaccgccacgttctaattctttagcgctatatggaagattctgattttgaacaatgaaaaattgactcccattggtatttggacctgcattggccatagaaagggcgcctcgaagattataaagttcctctgaaaattcatcttcaaaacactcaccatagatggattcgccacccataccagtaccagttggatcgccaccttgaatcatgaagtctttaataacgcggtggaaaatcacaccatcatagtagccatccttagctaaagcaacaaaattggctactgtttttggggcctgtttagggaataatttcacctttaaatcgccataattcgttttgataagagccataggggcatcatcattagtcacatctaattgtggaaattgtaattctttttctaccaaacctaattcctccaaggcatacaaaatgccatcttcttctacattttttgtaataaaatcagctttctcttttaaatcaccatgaccattgcccatggcaactttgagaccaacataatcaaatatttccatatcatttggtccatcaccaaagaaaagaatattttctggttttaaatggactttttttagaacatgagcaagtcctgacgctttggaaataccatttttaataacatctgaagaattttcatgccaacgtaccaaacggacatcttctttcaattcatctgaaagttgtaagctgtcacccacatcctcaaaggtccacatatgataaacctcatgatttttataaaaatcgggttcaacaggacaaaaaccataaacagggactagagccttatcaaccaactctgttcgttttgaaacaacagctttgtctttaccagcaaaaccatactcaataccaatttcttggcaccaaacaacatatttttcaataatatctttaggaattggatcattagataattcttcacctttatgattaatcacataggaaccattaatggtgacaaaaaaatctggatttaattgacgaatttctggaacaacaccgtaaggtgccctccctgaagcaataccagttaaaatatccttttcttgtaagctttcaaagacttttttgattgaatcaggcatataacccgtatctttgatgcgtaaggtatcatcaatatcaaaaaagacggcttttatttttttggctttgttttttattctaagatccattgttctccttttttgaataacctattttattataacacagagtctaattttcgtcctgtggcactaaatgatgctgaaaagcatagacaacggcttgggtccgatcatcaacttgtaatttcgataagatattagaaacatgtgttttgacagtcttcaaagaaatgaaaagctcatcagcaatcgtttggttatcataacccttagcaagtaaagccaaaatgtctcgttcacgcgctgttaaatcttcatgcaaatcaggattattatgatgatccttgattttcttatcaacttctgtttcaatcgctaaatctcccttagctactttttgaatggcattcaaaatttcagctgcgctggaagttttcaacatataacctttagcacctgcttcaatgacaggataaattttttcgttatctaaataactggttaaaactagaattttggcttctttccaatcttttagaagttcaagagtggcttctacaccatccatttctggcataaccaagtccatgacaacaacgtctggttttaattttaaagccaagtcaataccttgacggccattgctagcctcaccgataacttctacattatcttgtaaattaagaaaacttttcaaacccaatcgaaccatttcatgatcatcaaccagtataacttttgttttactcatcagcatctcctttcattattggtacatgaatatccataacaacccccttattttcagcacttaaaaactttactgtcccagctaaatcattaacgcgatcttcgatgtttttcaagccgtaactcaaatctcgaacgacatccatatcaaaaccaataccatcatcaatcatcttcagctgaacttttgaagaagtttgatacaaataaacttctagacgactagccttggcatgtttaagagtattgctgataaattcttgagcaattcggaaaaaattgctttcaatcgttttaggaagttccccaatatcttccttataaacaacctcaatattactcttatcagttaattctctaagaatcatagcaagtccttctgaaagtgtctttccttctaattctgtaggacgcaaatgcagtaaaaggactcgcaagtcattctgagcattgtttagcatatcttcaatagctaataattgtgtctgcagttgttttttttccaattgatcaagattgtgagaaacacctgacaaaatcatagaagaggcaaacagttcttgacttactgtgtcatgtaaatctcgagcaatgcgttttctctcctttttgacaatttcctgactgctggcaatataggtattttccgtcttttgcaaattattagttaactgctgcattttacgagaaaggcgattaacgtttttccctaattcggtatcatcttcctgtgtgatggcctgattaagcagaatgcgtttcaaattttggttgaggtggcgtttgctattatcatctaaaatcatccataccaacagtaaaagaaaagtcaaggaaataaaggcagcaagaagcgataaaataaattgctcaagaacaagccaatcagctaacaaacttttcaaatcaagattaagactgttaataatgacaaaaacaatggaaatgatggtaactgccgcgtataaaaaaatcattaagatcgtcttttttttcatatacgttctacctccaccaagcccgcaatgacattgatgataatttttacagatttggttcttccatctatatgatcagacagtctaatttcctcattgcgcaaatcatattctggtgcatcaaaaaagcgaacatagccatagatgctgctaacatccaaactaactgagacatcaacaggaactaaaatcttggtaggtccgtaaactttacgaatcatgaccacattattttgttcacttacaatgacctgactgagattaatcacatcacttccgctgagacgaataacattgatatcatcaaaagaataggtatctgtttccacatgttcatcattaccaatccactgatgtggttttttagtcacatctaaaccttcttcttgcaaggttaataaagcgtagcgattcttctttttgacttgagcaaaatgattaatcataacataaaggattccaacaagtaccgcagcaattgtataaggattgagcataaaaataagaaaaagtaaaagtaaactagctgtcaataaaaagtcatttcgactgcctaaacgataaaatctcaaggctaaaagagtaataaccacaatcaagataaaacttgagagattactcgccagaatagtcataaaagctaaagcaattaagatggtttcaacaaccaaaaaaaattgaaattttcgcataaggcttccttcagttctacaattattagtcattgtatcaaaatttaggataaatttcacctcttgatctagaccagataacactaaagataaagagaatttttcaaatatcaaagacgccatagcttagttatcatacatcaatcttatacagtcttaatcctagacggatacaagtttgataacaaaaaagttatctcttcaaacaaggaggctgaggcaagaaccttaatcttataaatataataactacaacatatgagtatacctgcattaaatgataacattattatcaacagatcataaacataacttgaattgacatgatgacctaataacatcatataattaaccgcctatatcattcaatagttcgagccatgatatataaaaacaaggattgagaagattcttctcagtccttgttttacctatttctttatttaatgtgaagttgtcgtcgcacttgaactagagtctgtcgaggcttcgcttgatgttgttccttcactgttcgaagattcagacgacgacgaaccagaatgagagccacctgatgttgaaacatacaagataatatcatcattagatgacagactgacagtattaccataataaggactttgaccgacaacgagtgacgaagatgatggtgatgaaatttctgatgagtaatcgctggcatcataagcttttatacggcttgaagaaatccccatagctgttaaagtactgacagcctcttcataagtagaatttttaagatttggcatagtgactttgacaaccttgagagttatttttttatcactgctaggatgataggtctttccgggttttggtgattgaccgataacagttccaccactgtagtcatcagatgaaacttccttaagaacaatactgtccctagaaacaccataattattagtcagattatcaatagcatccttgtaatcttgaccggtatagtcctccatcttaaatcccttagcactagctacaaaaatatcaacactagaaccttcacgttttttactgcctgcacttggattagttcttacgacctttccagcaccaacgttatcatcctcaattttttgaacgtcacccaccttaagacccgattttctaataatcatcttggccgttgataatttatctcctgaaacgtcaggaactgaaacagtactcggttttgtcagaaccaggtaggtcaaaacagcaataccaatggcaactaatataaagaagattttaaagaaacgagctaaaaaatgtctttttttcttaggcttaggttgtggtttggttttaggcttagatttatgatctactttatcctgattggaagttttgttttttaaggactgagcagctaaagagtttgctgctgcctgttccagttttggtagtggttttgtatctgaagcatcactgaaaacaagctttctttcacggctgcgattcagctgcagagacgttcttaaatcctgcaacatctcctgcgttgaatgatagcggtccgttaatcgtttagctgttgctttaataacaacattttcaagagcttgagggacatttttattctcagcaataatagatggtaaaggcttttgaaaatgctgcaaagcaattgtaacagcactatcgccatcatagggaatatgccctgtcagcatttcaaaaagcataatccccattgcatagatatcactttgaacagtagccttagaaccacgcgcctgttcaggagataagtaatgtactgaacccagcattgaattggtttgggtcaaactcgtttcagcaaaagccacagcaataccaaagtctgttactttagccgttccatctttggtcagtaaaacattttgaggttttaaatcccgatgaataatacccttttggtgggcaagagtcatagcagaaagaacctctttcatgattctaatgacttcagcatttgataaaggagcgtgatcttgaatgtatttcttcaagtcggcgccatcaacatattccattgcaaggaattgctgaccgtcttcttctccaatgtcacgaatggctacaatattaggatgattaagttctgccatggcacgtgcttcccgctgaaaacgtgtcacagcaacctgatctgtctgataattcgtacgtagaaccttaatggccacttcctcattatctaaaatcaaatcattagctaaataaacatccgccatcccacctcgtccgatagactggagaatccgataacgaccagcaaataatttgccaatctgaatcattgatctccctcactttcggcgtgaattaaggctacagtgatattgtcaagcccacctgcatcattagctaattgaatcaaatgcttggctttttcatctaagtcctttgtttcatcagttagaacagcaacaatagcttcattcgaaatcatattcgtcaaaccatcactattaactaaaagataatcatttgctcctaaggtttgaataccaagatctggttcaactggactagcttgtccaatagattgtgtgataatatttttttgagggtggctagcagcctcttcttctgttatttggccagccttaactaattcattgactagagagtgatcactagtcaattgcgtataaaccccatcgtgaattaaactaattcgtgaatcaccaatatgagcaaaaagaacattattttcaatgataactaaggcttcaatagttgtccccataccttgaaaatcatctgtttgacccaattcataaatccgacgattaactttttcgatattattaaccagccaatcacgaatttgtcctaagtccgttaagtctgtattaatccattcgcgccccaaatcagtaacggtcatctcactggctatatttccagcacgatgaccgcccatgccatctgccaatacaatcagtgtatgccccgcacgattatcaaatttattgataaaatcttgattattagaacgcttctgtccaatatctgtaaaaagggaaattttcatatgctcgttgtctgacaaggtcagcctcctcctaaatcttacgaaatacgcttaacttggctgataaaaaaaccgtctgttagatattgttcaggtgtaataagaagacaaccatcaacgacaatatctttctttttatgatttaattttacctgttcaaaatttggatgctgttccaaaaattgtttaagtaccatctgattctcttcagcaaaaatagtacatgtgctgtatgttattataccacctttttttatagtttggcaaacactatctaaaatctctaactgaattttttgtaagctggtaaaatccttactatccttattatacttaatatctggtttacgcctaatcaagccaattcctgaacaaggagcatcaactaaaattttatcaaatgtatccttagcaaagtatttatggacttttctagcatctaatttttgcggctttatataattggcggcttttagacggtctgcattatctttgattaattttagtttatgatcatacaagtcaagtgctataatctggcctgtcgtcaaataagaagctatatggacagcttttcctccgggggcactgcaagcatctagaacagtctcatttcctttaatagctaaagtgggcgctactaactgactactctcatcttgaatggtgatctttccctgtttaaataaatcactatcaaaaaactgacctgatgctttgaccagaccacaaggtgataaaaccgattttttggctcctgttgcttttgctatcacttctatttgatcaggattaaccacacgaatactagccttacttcgaactaaaagacttttcaaaatgctgattgccctatcttcaccgaattggctaatcatttttttaactagccaaactggtacagaataggtgatggaataacgtttattttttcgtttaatgacagttatgtcaggtcttttttggcgtaaaaactgccttaacacagcattgactaacttttcagcacctctatttctgctttttgccagatcaacagcttcattaacaatagcatgctgaggaattttatctaaataaagaatttgataaaggctaagcattagtaaataatagatccaagtttctaatttattgcgatcttcaatataatgagcaatataccattccaaggtaatcttgcgagtcaaggtcccataaacgagctcagtcagtaaggatctatcagcctgagaaagtttgtgcttgcttaaatagtgccttaaagcgatattgctataggcagtcttatcaaaaatttcagttaagacaaaaagggcaccactacgtgcagttggttgcttatttcccaaaataatcacccactttaagtttttgacctaggccgtttaaaaagtcagtgatagacattttaggttttccagcaggctgaaccaattttaatgataaagcatcttggtttgcagctacaatcaaagctttcttcgttttttcaatgatttctcccggatttccagccccattaacgacttcaacagcataaattttaaaacgtttaccatcaagcagagtgtgagcaactggccaaggattcataccacggacttgattgaaaatatctcgggcagatttgctccaatcaattttttcttcttgagaactgatattaggagaaaaagttgcttgactatcatcctgagcctgtggctcaattttaccagacagatagcctggaagagtctgcaaaagtaagtcacgcccaatgatagctaacttttcaaacatcgtaccaacatcatctgcatccgtaattggtgttgaagcctttgcaatcatatccccagcgtccatctctttgaccatttccatgatggttacgccagctttcttatctccattgataatagcataatgaataggtgccccaccgcgatatttaggaagcaaggatgcgtgaacgttgacagcaaaatcaacagaattaatcaatatcattggtaaaaattgaccaaaggcagctgtcacaataccatcagcacccaaattcattaattctaccatttccgatgaacctgataacttctcaggctgataaacctttaaaccatgttctaaagcaagttgtttaacaggtgtcatcttaatttcttttttacgaccaacagcacgatctggctgtgtaacaactgctaagacatgataatgactgtcctctagtaaacctttgagaacagttgctgaaaaatcaggtgtccccataaaaattaattttgtcatttgtaacctcattagtgtgtcaccaatctaccataagcacttggcaagtttaaagtgttttacataaaactttgtggctcatgatcaataatcaaacgtaactttttattttctttagcttgagttaaatctaaaatatgatttaaaacaatctccaactggtcttcaaaacgatacttaatgataatttgataatgataaagattatgcgtcctagcgacaggtttgggtgttggacccaatattttaatcttatctgtcagtccttccttgatcaacgtcactatctcataagattttttgataacctcttgctcatctttatgtgatagagttaagccaactgtgaaatagtagggtgggtaggaaagtgccttacgaattctcatttcgtagcgataaaaagcttcatagtcctgttcccttgccaactgaatagcataatgattaggattataggtttgaatcaaaacctcacccggtttatttgcacggcctgcgcgtcctgccacctgtgttaaaagttgaaaagtacgctcacttgagcgaaaatccggcaaattaagtgaagtatctgcatttaatacaccaaccaaagtaacattaggaaaatcaagtcctttggcaatcatttgcgttcctaaaagaatatcagcttcatgacgaccaaatttcgtcagaatcttctcatgcgctccctttcttttggttgtatcaacatccatccgtaaaatgcgtgcttctggcaaaacttgttttaattcatcataagctttttgcgttcccgttccataataacgaatttgccgactttgacaattaggacagttgtaaggaattccttttaaaaagccacaatagtgacaattcattgttttggtatccatgtgtaaagttaaggagatatcacaattaggacagttatcaacataaccgcagtcacggcacataataaaactagaatacccgcgacgattaagcataagaacgacctgttccttttttattagacgatctttaattttatctagcagaacaggtgttaaattactcactttttgctgaccgatataatcacgaaaatctacaatttttaccttgggaatgtgtgcttgaggattggccctttgacttagctgcaggaagttataaacaccacggctggctcgcgctcggctctcaatagatggcgtcgcactgcctaagactaaaactgcctgatgatattgggcacgcaatagtgccacctcccgcgcatgatagcgtggactagactcttgtttataagttgcctcgtgctcttcatcaataatgatagcaccaatattttttaaaggagagaaaatagctgagcgcgctccaacaacaactttagcttgattggatttcattttacgccactcatcgaatttttcaccatcagacaagcccgaatgcatgatagcaacttgactgccaaagcgagaaataaagcgactagtcatctgaggtgttaacgaaatctcaggaactagaacaatggctgttttacctaatttcaaagtctgatcaataacatggagataaacctctgtttttccgcttcctgtaattccttcaagcagataaggcttattagaagaaccaatagcagctgttatttgctctactgctgtttgctgttctgggtttaaatcaagaaaatcagattgaataatattttcaaaatagctttgggtacgattcacttctacttgtgaaatattgagaacagcttcttttataaaataatgaacaacctctcttgaaaaaagccgatacagatccgaaagaggaccggactgcggatgattagcaagataatctttcagttcttgccgctttttagctcgcttattgataagaagatgagataacttttcaagattaacatcataacatttttgcgttttaattgtctttctatccttggctaaatattctatatcaattttaccagcctgtatcaagcttaaacttttagtctgtatttcttgattcagttgcgaaaaatttatctgttttttaccagcaaaaattaaggccttttcttcctgagatagcccttttttaggtttcagcaaacgatcataattagaatttaagagatttggaatcattgatttcaaaatagaaatcttataagaaaaaaccgttttacgcatttgatctgctaattccaactgctcctgattaagcaccggttccacatctaaaacgtcaataattgtttttaaatgctgagctgatccactatctacacttactacaaacccttgtaataatcgatttcctttaccaaaaggaacatgaacacgtgaacctgctgtaatcactgataataatgcctctggaattttataagaaaagggcttatctgtttgcattaagggcacatctacaatgacctttgcaatttttgtcatagcttacctcaatatgaaaaaatctaagattgatgccaaccttagattttctcaccttcttcttccttctcttttgcaatttgttctttaattttgcgttcttcctcttctttcgcaatacgttcagcttcagctctagctctcacagctgcacgtttagcttctggatcagggtgaataacgacattacctgcttcaatctcttcaagtgcttgaagagttggcttaactgatgtgaaggcttgagttggggttgctccagattcaagttcatgtgcacgtttagcttgtaaaataaccagcgaatattttgatggtaccttatccaacaaggtatcaattgatggttttaacatcataaaagttttatctcttttctaatttatctaaggggtaaaggcaattcttcattaatcattttatgataacggccaataacacgttcaacacggaaatgctccgtctcaataatatgcttgactcgttctgctgccagttttacttcatcattgacaacagcgtagtcatactcgcgcattagggcaatttcttctttagcacgttcaatgcgttgagcaattacttcctgactgtctgttccacgtccaactaatcgatcctttaattctgctaaatccggtggcgttaagaaaataaaaacaccgtctggaaccttttgtttaacttgaagagcgccttgtacctcgatttcaagaaagacatcaattcctttatctaatgtttcatttacatacgttaaaggtgtgccataataattaccaacatactcagcatactctaacatttggccttgtttaatgagttcttcaaactcctcacgtgtccgaaagaagtaatcaacaccatcaatttcacccaacctttgcggacgcgttgtcatggaaacagaatattcaaattgatggtcaggtgttgaaaaaatttcctgcctaaccgttcccttaccaacaccagaaggtcctgaaaaaacgattaataaaccacgttcagacatttcttgctccttaaagtttctgtttctagtttaacaaaaagccaagggattatcaagaaatttttcctaactttatctctttcttccaatagttaatgacggatactcctcactaaataagactgccttattagccattacaaagtgttccgttacgactgcatagtcagcttaagtgcccataccgtacaaagcctgtttatagcttttttaagttttggagcgaacaaaagtatgcctaaattccttgatacaatccgattaaaatacagcaccacacacttcctaattttgatcttatcgtctcactttttgcaaagttaattgggtattgacacaaactttccttcatggaattagacagggatttccgaccaaccgctgtgttaaacggaaaccactgcacaataaaagggcggaacattttgttcctacccctgcttttctcatttagcataatcaatcgcacgaagttcacgaatgactgtaactttaatattacctggataatccaaattgttttcaattttttcacgaaccttgtgagctaaaatggtgacatcatcatcagaaagtttttctggttgaaccataatgcgtatttcacggcctgcttgcaaggcatagctattttgaacaccatcaaagcttgttgctatttcttccaaatcacgcagacgtttgatgtaattttccatagactcattgcgagcacccggacgagctgaactgagcgcatcagcagcagcaactaaaacagcaatgaccgattgagcttccacatcaccatggtgactagcaatagtgttaatcacaacaggattttccttgtatttacgagcaaattctgttccaatctcaacatgactgccttcaacctcacggtcgatagcttttccaatatcgtgtagaaaaccggcacggcgagctaaatcaacattttcacctaactcactggccaaaagtccagctaatttaccaacttcaacagaatgacgaagaacattttgtccataagacgttctaaattgcaaacgtcccatcagtttaatcaaatcaggatgaagattgggagcgccaatttcaaaggcggcagcttcaccatattcacgaatccgattgtccatttccagacgattcttctcaactaattcttcaattcgagcaggatgaatacggccatcttggataagcgcttctaaagtcatacgagcaatttctcgacgaataggatcaaagcctgataaaacaaccacctctggtgtgtcgtcaataataatatcaatacctgtcaagctctcaagcgttcggatattacgaccttcgcggccgataatacgacccttcatgctatcatcagggagatgaactgtcgtaatggtctgttcagctacataatctcctgctagacgttgcatagcttgagctaacaaatctttagccgttttatccgttctatctttgatttcacgctctgcttctttaatacgattcgcaatatcatgcgctaaatttttctctgtttccgaaagaataataccgcgtgcttgttcttgacttaaggacgctattttctcaagttcctcagcctttttaacttctaattgtttaacttgtagttcacgctcatcaatatgcctagatttatcggatagactttgctctttactatcaagcaattgttctttgctgcttagattttcatctttacgatcaagagatgctgcacgctctgtcaaacgcgcatccatttgtttgagctcttgtctttcagacttaaattctttttcaatctcttcacgatattttctagcctcttcttttgcttctataagcagttcctttttataggccttactttcacgttctgccgtttttttgatatgctcagcatccatttcagctttactgcgagcattgacagcatcttgttctgcatttaaaagagtcagttctgcggtttctttagctttctttaaacgagccgaaataactgcataaccaataaccaaaccaatgagggagaaaacaagagttaaaagaatatttaacatgcttttacctcaaaatattattggatttcgattagaaaatccaaattatagtttatcataaaatgccattttctacaatctaaaattatcagcaacattttctaaattatgatatgattatcataaaactaaaaggagtttactatgacaaaagaagttactgttgaaagctttgaacttgaccacactgctgtaaaagccccttatgtccgtcttatttcagaagagtttggacctaaaggcgatcttattaccaattttgatattcgcttagtacagcctaatgaagactctattccgactgcaggccttcatactattgaacatttactggctaagctgattcgtcagcgtattgacgggatgattgactgttccccttttggctgtcgtactggttttcatctcatcatgtggggtaagcatacaacaacccaaatagccacagtcatcaaagcaagtttagaagaaattgctaatacaatctcatggaaagatgtccctggaacaactattgagtcctgtgggaattacaaagatcatagccttttttcagctaaagaatgggcaaagctgattttaaaacaaggcatttcagatgatccttttgagcgtcatctagtgtaaaataaaaataggatggataccctaactgctactgagtagtcaagggatattcatcctatttaatatttggtcttaaaatatgaaaagataacaatgtttgtctttcttaagcaaataatccaaagtatctctctaacacttttaaacatctcattcttttttaataatctaatttatccgaatgaccggcggcatttcccacaaaataacctgttttacaattaattgagaaaagataagtcccatctggcttaaacatattgtaataaccattaccattgataatattaactttctcaagaatatagtcattacctgtaatataaccacgttgttgtgaaatagctactattttttctaaaatacctgcattaaaggcccaagctgaattgttactatcagcaatcttagattggtcataaggaactcgactacgatcacgttgcagcttagaaacatcatagctggaaataccataaccagaagcacctgcatttgatgtcccattatttggagcagcaggtgtacttggtgatgtgctaccagatgtattattagatccagatgagccattagctggtgtattggagtcagcagctggagcttgagcattttgattactgccttcagtatttgatgatgtaccgctgttggcatttgatgaagcagctgagcttcctgatttcttattattagcttctaattgtttgcgtccatcagcaatgacagatttcaaaagggcatctaatgtagcatttcctgtatttaagctcttttctgaaatatcatcaaaattagcattatctttaacagcagctgcttttttatcaccatcaagaatggcagttgttttaaatttcccatttacagcattaatcgctgaaatttgacgcttcaagctttcatacttctttttagcctcgtcataatatttgctgtccttaagttttttcaaatatttttctaatttaggcaagttagcaaattgattgttttttaacttcgttctctttgcatccgcaaagaaagccgtataagacttttcaaaccttttagaagctgctgtaaaatctgttgatttctttgttgacgttgattttgttgttctcttagtttttgctgtgtgatggctcaattgataaacactgtatgtagcaccagcagccaataaaagtaaaacaataaatgatgccatgattacttttttacgcttataaaaaggcggttttgtttcatcatcttcatcaaaatcttcagaattcccaacatcatccttatccaaatcagaagttggagcagtcaaaaaactagacttctcctcagtatctaatttggcagtctcttgcgtatctgacaaaggaacatcatcaaattcgtctttcttccagatctcctgattcggattgatagctggtgccacaatggtatcttctaggctctgctctttagcagtgtcagcagaaatcgctgattcagaaggtatttcttcttctggctcctcaatgggatcaattaaacctgtgtcaactaattcctgacgctgttgcttaataaaattatcaagtgtgctagtatcaatgctttcaaaatcatcactgctagtatcaaatttccgtgcggttacttcatcacgatgttgcttaatataacggtctagaacactatcttcttcagttacaccggccttaatttcggaatctttacgaactgcttcaccaactgtcatttccttggcatcttgaaaatcaagactgtctttgctctcactgttttctattggatttttttccttttctgacacgcacttcccgcctttctatctaagcacacgtttgacacgttgaccataaaattgatataaatcaacttttaagcttccattataaagcttacgctttttatccgcttttctaccaaatttttgttcaaaatcagtatcattagtcaaaataaactgactccatgtttttaaaggagcaaatgtttcacccatctcattatacaaaatgtcaactgctttgtcatcaagcaatctttccccataaggtggatttgaaatgagaacaccgttgattttattggttttaaagtcttgaagacgcatttgtttcaatttgacaacatcttcaagaccaacttctctagcatttttccgagcaatttctaccatacggccatcaaaatcaaagcctgaaatatcaagttgaatatcataatctgcttgttcatctgcctcattacgaacccgggtgacaagtgcctcatccacccaaggccattcttcaaaagcaaaatcacgattaaatccaggtgcaatattcataccaatcatagcagcctcaatacaaaaggttcctgaaccacaagttggatcaacaaaaggcttatcagggaaccagttacttaagagaataatagccgctgccatgttctctttgataggagctccacccttttcagtacggtaaccacgtttgaatagacttggtcctgttgtatcgatcataactctagcctgatctttaaggagagagatttctattttaaactcaggcccattttctggcagaggtacactgtcaggtctatgaaaataatgttgtaatttcttgacaacggcctttttcgtaatgccttgtatgctcggctcattatgtaactttgacttgacagatttagccttagcaacaggaaattggcagcccaaaggcaaataattttcccaatcaagagcatagactccttgaaacagttcttcaaatgttttggcagggaattctcccactacaattttgattcgatctgctgaacgcagccagagattggatttagcaatagtctcaatatttcctttaaaaagaaccctgccgttttctacttgacaatcaagacccaagtttcttaattctttaccgacaacagcttcaatacctgctgctgcagttgctactaaattgaaagtttttttcatgattcctcactaaagacaataaaagctagccaaagctagctcacctattatgcaattttctataagccatgttttgttccaaaggtgactaggtaccaccttttttgataatcatctgtctactgcttatgcagtcagaaaagaccgttctttttccagcttttccatgcccctaccaaagtttgggttgctagcttgaggggtttaccgcgttccaccttttatgtttccataaaagctacgtcactgtggcactttcagaattactccggcctatcaaaaacttagccattttatccgccgtaatgcgcaaagcacatccctagacttatttttttgtctagcacaaacactactggcatcacagccagtgctagcatggactttcctcatgataaaattgcaatatttaccacgcgattatccaaaaattgcatcgttttcttaatctattcggtaatttgtttaccaaaaacttctttttctaaacgactgatacgttttaaaatatcaaaatttgtagcggtagtcgccacacgactagaacttacagaagctgctggagatactgttgtttgagcggcctcttgacgttttttagcttgttttacttcttcttttaagcgcgtattttcttgacgcaattcttcgattgtggaaatataggtttcataatccttaataatatcgtcaaggaattcgtcaacttcttttttatcatagccacgcatgctagatttaaattcttgttcaaaaatatctttaggggtgtacataatacttgccatacttttatctctccaaacatatcatttcgaccagcttacagctgttccatcatttttaatcatacagaaaattatttcaaaaatcaagtcttttatattacaattctaatcaaagtcctgaacgatgtcatctaaatcttcaaaagtaagcaggctcacagggtagttatccttagctgtcatcatttgataaagatattttaaattcgtttccttatctttatcataaaataggtaagctctatccgtattatccaacaaaaattgattatattttttaaattgataggaattttgataacgtttatagctactttttacaaagtctgtctgtttaaatttaaagagcttttcctgattagcttcactccagtgctctccataattttcaaagggaaagatagtagccagttgcatatcatattctgtttggagatttaaagcaacctctaaagcccagtactcaaagcccaaattacccataaaaacaaaccaatccactccttcttcaagaaaatgaatgaagtctcgcttaattgctttcttgataattgttattttaggatccttatcctgaaaaattcccaattcaaaatttttataacccgttacaagaattgtcgtcataaactgttgtccttttcaattttatgatataatagtagtgttttatattatgaatacttatgggagagttaggagagctatggtcaactatcctcatcatttcattcgtaaacaaagcaaacccagtcaaatatctaaaacaatcaattttgccaatcgtggaatgtcctttgaagcagctataaatgcgacaaataactactatttatcaaaaaaaatagctgttatccataaaaaaccaactcctattcaaattgtaagggttgattatcctagacgaagtcgtgctaaaattgttgaggcttattttaggcaggcttcaacaaccgactactcaggagtctataaaggatattacattgattttgaagcgaaagagaccagacataagacatctattcccatgaaaaactttcatgcacatcagatcaaacatatgtcacaagttttagaccaaaaaggtatttgctttgtcttactgcatttttccacacttagggagacctatctgcttccagcctcccatctaatccatttttatcggattgataatggcgggaagtccatgccacttgattatatcaaaaaaaatggttatcaggtgaatgtgtcagcttttcctcaggttccttacttagatattattgataaaaacattttaggcggtgattaaaatcaaattcaacaagtttaaatttgacaaatccaaattaaaaaaccttaactttaaaaaaccaaattttaaagagtttaaatttgacaaaaattttggaatgacagttctaaaatatggactaggtattctcttaagtgctattattttagccattataattggaggtcttctgtttacctattatgtcagcagtactcctaaactatcagaagctaaacttaaagctactaattctagtttggtttatgatagcaataataatctgattgctgatttaggtgctgaaaagcgcgaaagtatttcttcagacaacattccaatgaagttagtaaatgccgttacctctattgaagatcaccgtttctttaaacatcgtggtgtcgacatttatcgtattattggtgcagcttggaataatttacttcataaatcaactcaagggggatccactcttgatcagcagcttatcaagctggcctatttctctactaaagagtctgatcagaccttaaaacgtaaagctcaagaagtttggctgtctctacaaatggagaaaaaatacacgaaagaagagattctaactttttatgtcaataaggtttacatgggtaatgggaattacggaatgcgcactgctgcaaagtcttattatggcaaggatcttaaagacttatcaattgcccagctagcgacacttgcaggtattccgcaagcaccgacacaatatgatccttacgctcagccaaaggcagctacaagcagacgcaataccgttttgtcacagatgtataaacataaaaaaattacaaaacgagaatatgatgctgcagtagcaacaccaatttctgatggcctgcaagaactgaaacgctcctctagttatccaaaatatatggataattatctgaaacaggttatttcagaggtgaaaaaacgtactggtcaagatatcttttcagcaggcatgaaggtttatacaaatgttaatgccgatgcacagcaatatctctggaacatttataatacagatgaatatattgcttatcctgatgataatttccaagttgcttctactgttatggatgttactaatggtaaagttattgcacagcttggcggacgccatcaagatactaatgtttcttttggtaccaatcaggctgtcttaactgaccgtgactggggatcaaccatgaaacctatttcagcatatggccctgctcttgaaagcgaagcttttacgacaactgcacagatgctaaatgactcggtctattattatccaggtacaacaacacaagtctatgactgggatcatcgttataatggttggatgactatccaaacggctatccaacaatctcgtaatgtccctgctgtcagagctattgatgccgctggattagatactgccaaaggtttcttaagcggtctcggtattgattatcctgagatgcgttattcaaacgccatttcaagtaatacaagtagttcagaacaaaagtatggtgccagcagtgaaaaaatggccgccgcttatgctgctttttctaatggtggaacttattatgaaccacaatacgtcaataaaatagaatttaaggatggaacatcggagacctatgatgctaaaggcaatcgtgcgatgaaagaaacgacagcctacatgatgacagatatgttaaaaacagtattaacatatggtactggtactgaggctgctattcctggtctttatcaagcaggtaaaacaggaacatccaactatgatgaaaatgaattggtagagatgtctgaaaaacttggtattaatccttatggacttggtactattgctccagatgaaaactttgttggttatacacctcagtattcaatggctgtttggacaggatataaaaatcgcttaatgcctgtttacggagacagtatgaaaattgctgcgcaagtctatcgtactatgatggcttatctttctagttcaggtaattctgactggaccatgcctgacggtctctatcgcagcggtggttatctttacctaaatggttcaagtgggtcaaatagtaggtatggtgcagctcctgcaacttcatcgtcatcttcttcatcatcttcttccgattccaacaataacgatcaaaataataatcaaactacagaagcgtctagtgactcatcttcatcaagttctgatgctacgacatcttctaatccataaataattattttaaaggcacactcttggtattagagtgtgcctttaaatatccaaactaagcatatatcgtcatctttttaaaaaatcaaaactatactagtaagttcttattttgcgagagcccccattggatcccaaggtgccagaacttgtggtgcctcttcataagccgctagttcctcagcagtaagaaattccttacgaacaacgatttgataagtgtattcatccatccaagcatctgaagcaacaaagtagcctttttgacccaccttatccccccatgaattttcgactttccatttaatagctttgccattttcatccaaatcaacaccagtcaaaaccatagcatgggtcatgaggctttcactatagtccaaacgaccagccttgtcttgtgtcagatcaatattcatagcagccttaaaatcataggtattagtagctaagattcccttttgacggtcggatacctgacccacatcagagccaaaccagactgtttcgccagcccgcatctgagcaatagctaactctttaaaacgttccatttctagattgagatagcgtacagcagggctgcctacaacattacctaacatgtcaactgtataagatttcccataaggcttgtccgccgttggggcattgataatcgaaacatagtctgacagattaagaccaacgtattttttataaaaggctcgtggtgtaatctttttttcagattgataatgattatctttatcacgataggcaaaatcaaagtggcgtggtggcaaaccaagattcatcgcaagaaaattaaagatttcttgtaaaagttcttccttcttggcttgaacagctttactgtctgctcctgctgcaaggatttggcgtaaaatttgagcatcttggcgcagcaatttattgagatattggtttaattcacggctagcacttgatgagatagattctggatagaccgatttaggcacaacaccatatttttcaaaaagagcgacaaccatatcccattgtccaccatcttgttggggcgtatcaagcagaaatttcactttgcgactagcaagttcttcatccgctgtcgcaatgacttgttctaagaaccagtttgacttttcgtatttatcccagaagaaggtatgggcttgtgacaattcaaagttttccaacttgaagtctgaaataagtttgtgacgaaaagtgttgagtgctgcaaacatccagcaacgtccagaagctttttggttagaaacctcatctttggtcaaatcaatggaaaaaacatgatcgttttctacttgactttggcgtgtttcaagcgattttaataaaccgttatgggttacagcattttcaacagcatgaaatttagtatttgcttcataatcagcaaataatttatctgtaaatgtttgtgttaattgagacatgggactctccttgtttgaataaaattatctaacttccaataaaccactgcgtcaaacatttgatgttgcacagattgaaggagtttgggacttttgtccaaactcttcaatttacttccaaaaatcatcaaagatagaaatcggtaaatgacgtttatgttctgttttgttccaccaattttcaattattttctgggctactggggagacttgcttgccctctaaataatcgtcgatatcattataggtcacgccaagggcaacttcatcagcgataccgggtttattttcttcaaggtctgcggttggaattttttcatagagagccttatcagctcctaattctgctaacagctgcttaccttgacgtttattgagacgatataaaggtaaaatatcagctccaccatcgccaaatttagtaaagaaaccagtaatgttttcagcagcatgatctgttccaatgacagctccgccattttcaccagcaacagcatactgactaatcatccgctgacgtgccttgatatttcccttattaaagtcagaaacttgaactccagcctctgctaaggcagcgacttccccatcaacagcaggtttaatattgatagcaagactgacatcaggctgaataaaattgagcgctcgttgtgcatcatcttcgtcagcctgtacaccataaggcagacggatagctataaatttatagccattatcacccgtttcatgacgtaattcctcaatagcaagttgcgctagacgaccagcaagactggaatcttgaccacctgaaattcctaaaacataagatttcaaaaagccatgcttcttcatgtaagctttaagaaagtcaatggatttacggatttcttcttgagcatcaattttaggtttaacacccaactgagtaataatatcttcttgtaaactcatttaacgtcacctttctcataggcttccttacgaatacgatcaatcagattcaccttattttgccaaacatcacgcgccagatcaaccggataatcttgtggattgaggacgcgtttatactcatcccagagtttatcaaattctctgcgcgcataatcttgaatatctgataaacttggctgagtataaactaatttcccttggtcaaaaatatcaactaaaagcggtacggcatcaaaatcgcgaatttttttattaatgtaagtataagttggatggaacatgtcaatttcatccaaagaattgacatctgtatctgtgaaggtaatgtagtcgccttctgattttcctttagcacgactggtgatgcgccaaacttgtttcttaccgggcgttgatactttttctgcattgttagagagtttaatggtatcttgcatcacaccattatcatcttcaatggaaacaatcttataaacagcccccaaagctggttgatcgtaagctgtaatcagttttgttcctacgccccaaatatcaattttagctttttgcattttcagattgagaatggtattttcatcaagatcattcgaagcataaattttagcatggggatagccagcttcatctaacaatttacgaacttttttagaaagataagccatgtctcctgaatcaatgcgcactcctaggaaattaatcttatcacccaattcattagccacacgaatggccgcaggcactcccaaacgcagcgtatcataagtatctactaaaaagacacagtctttatgcgttccagcataggccataaaggcatcatagtcattaccataagcttggacaagggcatgcgcatgcgtacctgaaacgggaataccaaagagttttcctgcacgaacattgctggtagcgttagcaccaccaataactgctgcgcgcgttccccaaatagctgcatccatctcttgagcacggcgcgtaccaaattccaaaagcggctcattctcaataacagaacgaatgcgagcagcttttgtcgcaatgagggtttgaaaattaacaatatttaaaatggctgtttcaactaattgacattgagcaagcggtccttcaatttgaacaatcggctcattggcaaagactaaatctccttccttagcagatttaacactcaattctaatttaaactcttttagataggcaacaaaatctgcaggataacctaattcctctagataagcaatgtctgtttcagaaaaactcagtccttgcaaataagcaatcattcgctctaaacctgcaaaaacagcataaccatttgcaaaaggttccttacgaaagaagacttcaaaaacagctcttttgttatgaatcccttggttgaaatagacctgcatcatattgatttgatacaaatctgtatgtaaggttaaactatcatccttatacatacattatctccttttttattaagatacaaagggcgttaagaaaacgagaagaaaataggaggctgacaccgtgcgcttgcacataaggcaggctatctttttctcgacgcttttagcccgtgttcaattatgtttattgttactattataacacaaaaacgctaaggtaattagacaattaaaaaggagtaaaaataaatttaatgaaactcaaatttaaattcaacttattatttttctatttataagcaaaaaaggttaggataaagtggtatgttagagtagttatctaacttttgagacacactttactgttctaacctttaacattgtttgatttattttcaaatccttaatagttattgacaatatattgataggcttcttgagctgctacggcaccatcgccaacagctgtcgtaatttgacgaagatctttttggcggacatcaccgatagcaaaaacgcctgctgctttcgtcttcatatgatcatctgttggaatccaaccagcttcatctgtgatatctaattccttaaccatacttgagacaggatctaagccaacataaataaagacaccaccaaaggcataattgtttacttgacctgttttgacattttcaatatcaacattggttaccttaagatcattccctttgatttctttaacaacagaattccagataaagtctactttatcattggcaaaggcacgttcttgcaatactttttgcgcacgcagttcatcacggcgatggacaatagtaactttgttggcaaatctggttaagaaaagagcttcctcaacggctgaatcgccaccaccaacaactaacaagtcctggccgcggaaaaaagcaccatcacaaacagcacagtaagaaacaccgcgactattataggtttcttcaccagcgacagcaagagggcggtgtttagcacctgtagcaatgataacagttttggtttcatagctattgtcatccgtaaggaccttcttgaaattaccatgatcttcaacagcggttacaataccatagagattttcaacaccaaatttttcaagtggttcatgcattttcattgatagttctggtccagaaatcaagtcataaccgggataattttcaatatcagaggtattattcatttgaccgccgggcgcaccttgttctattacagcaactttgagattgcttctagcagcatagagggcagctgtcatgccagcaggacctgagccaataataattgtatcgtacatatcttactttccttctttttttgttctttcattctaaatcaattttataaaatttaccaattttatgctttgaacattagaataatagccataaaagcaaaagacaaaataggaatggtgaccaaatctatcaataaagcttcatataaaattgttaaacgctctttagaagtcttatctttttttctaatagcacgataaagaatccaacccgcactaactaaaataactgccaaagcagacataagaagaccttgaatatacaaattaaaaatctctactaacatattaccaccataaataaaaatactctgattaagagcattcttattatatcaaataaaggtttttttgtaactagcaaaaaattcttctgtgcgtttttcttgaggatgattaaaaagttgatccggcgttccctgctcaagaatatgtcccttttcaagaaatagaactttatccgctacctgacgaacaaagctcatatcatgactaaccaataccatggtttgacctgatttagcagcatcagcaattgacttttcgacttcaccaacaagttctggatctagcgctgaagttggttcatcaagcaaaagaacatctggtttcatggccagagcacgagccaaagcaacacgttgcttttgacctcctgaaagatggcgcggataatgattttcccgatcagaaagtccaaccttggctaattcttctttagcaattttagttgcttcatcatctggcaatttcttaacaatcttaagaccttctttaacattatcaagcgctgttcgacgctcaaaaaggttaaactgttggaaaaccatggctaatttacgacgcaaagttaaaatctcttctttgctaatagtatcgaaattaaccttaaaatcatcaatttcaatactgcctgaatcaggctgctctaggtaattcatactgcgtaaaaaggttgatttcccagcaccagaagcaccgacaagggctacaacttctcccttttcaatatccagattcagaccatctaagactttttgtccagaaaattccttggttaaattggaaatgcgaatcattaacgcacacctccttccacagcttgatccttaacaatgtgatcaggagaagcaatctccattttcttttcgataagacgaccaacttgttcaataataatgctaacaccccaataaataatagctacggaaataaaacgttcaaagtaacgataatcactaccaccgagaatctgagcctgagcaaacatttcaacaattccggcattaaaggcaagagaggttcccttggtcaagccaattaacgtattaatcaaggttggagttgccaccacagctgcattaggaatgataacacgtcggtaaacctgagcagttgtcatccccaaactcttagctgcttcaatttccccagaattgacagattgaatagctgcacgaatggtttcactagtgtaggcagcttcattaaaagcaaaggctgtaatcgcaaaaacagatgctggaatagcattaatattaaaatcagtccccatcttttgattgagggctttcagtaacaaaggaataccataataggtcaacatcagttgaaccaagatcggcgtcccccttaaaaaagaaacaaagaaagcttggatgggatagagaattttaacacgattaagtttaacaatggcaaataaaagcgccaaaacaagaccaaaaatggatccacctaaagtcaaaattaaagttgttggcagcttttctaaaatagatggaatggcatcaaagactgcccgccaactgaataatttaccgttaggtaaactggcaacaagtttgtcataccaatttatcgttaataatagattaaacataattttccttttctaaacgcttttaataaggtaaatgcgaaacgcgatcacccgctaaatactgctgacttaatttctttagaatccctgcttttttaagctcttttaagcgtttattaacaaaagtctgtaatttttctccagttttatctttagcaaacaagagatactccaacccgtctttttcaccaccaatcttacccttgacattggtaactttcaaattgatagcttgatctttaataacagtttgaagagaaataacatcgtaaaataaaaagtcaattttccctgcttctacattttgaagacgttgggttagggtaacggtattagcgacatagtgaattttaatagcagttttctccgcatgatttttattccaattctcaagaatagcagcatagttagaaccagcataaacctctaccgatttgcctgataaatcatctaaagacttatatttgccttttttactagcaatggcataattggattttgaaataggatttgaaaaaagatactttcctgcccgttctttgctgtaattaaaattattggccgataactgataacgtcctgagtctatccccgtcaaaatagaagaaaaggatactgtttcaaatttaactttatattttttagactccttgaaaatagccttaaccaaagcaatatcatatccatcaaactttttatcctttttataagtaaaaggagctgtatctgagtctgttgctacagtgattgtttcctgtgaagcagctttcactggtaaggtaaaagcgaccaaggctaagctagctaaaagaagtcctaccattaaccttttgataattttcatatcatcatttctcctaaaatagtttcatatctcagtctatcacgatacacaagctctgtataatagttttttcctatcactgtgataatatttttctatcactccacaacttaaatactagactcctcaagtctaaaaataatatccatctagtcaaaatagaatattcttaccaaataggactaaagcattcgaaatttaaaaattgggacacttaatcccaacttttctctctatatatcaaaaacgttgttttttagctttacgattagcacgattttgggcacgtttaacaaaacggcgttctttacgacgtttttcattaactttccactgaattttcttcttgtatcccggtttgattttcttctttttctttttgaccagacccatcatttccagatcaagtttttcctgcgttttcttacgattgaggcgccgatcccgatcataagtatcctgaaactccccattttttaagactttaggaacaaagactatccctaacttctcaagttctctgatatcagaatcatcactgggttgatataacgtgatagctgtaccagaaagaccattgcggcctgttcggccaacacggtgaacaaagaatgataaatcttgaggaatcgcatcattaatcacatgactaacgccttcaatatctaagccacgtgcagctaaatctgtcgctacaatgtattcaaaatctagttgcttaacctgattcataatccgcttacgttcacgcggcggaattccaccatgaatttttgcagttttaaaaccattagcagacaagaaagcgtgaagatcatcaacacggtctttggtattagcaaaaataatggccaaatagggtttcaaactctttacaatctctaatatttgctgatttttatcgcgtcccttagttgaaatcagccaattgctaatggtgtctgcaatgactgtactggtcttgattttttctataataggatgatttagatattttttcaaaaaaggctgtaatttttgaggaatggttgctgaaaaaacaaggagctgtatatctttgggcaaacttgcagcaattttatcaactgtatctaagaagcccaaatcaagagtcatatctgcttcatctacaacaaaagtatgagctttatggatatcaagatgcccagatttaactaaatcataaatacgacccggtgtcccaatcacaatttgtggctgagttgcttttagtttttcaacttgacgaagtttatcagtcccgccaatatagttagcaagccgaatattttgttctgaaaattgagcaatttgtttagcagcttcataaatttgtctggcgagttcacggcttggtgcagtgataacggcttgaacatctaaagaatcttcttctaatttttcaaaaataggtaacaaaaaagtatgagtctttcctgatcctgtttttgattcaccaaccaaatcttttccagataagataagtggaatcaggcgttcttgaacctccgtcggtccttcaaaatgtaagtttgccaaagcattgttaatataatttttaaatttaaaatctgtaaataacatgttaacctctttattgttctacttaattatagcattaaaaagcccaagaaagcaaaacgacaactcagtatgtttaaaagtaaaagtcttatattccaatgtgtttgcttcttactttctcaaaacacaaaattatcttttctaacagcaaaaaacaccctgaaagttagctgatagcagtaaactttcagggtgtcgcaaatcattatgcttttttctttctaaacgcccaataatagaaaaaaagtagaggataaatcttccaataagaacgccaatgcgataaggcaaatctcccgacttaactggcattactaaagcaaaagctgttaaaataacggctaaaaccaaggagcataggagcatactctttaaattttcattaacttctcttataaatataaaatcgctaaaataagtaaactcccgagaagacctattgaccaaagaaaaaaatcaacctgccactcagaccactttttaccagattctcttagacgtaagccaccaagttcaagatggtgatgaaaaggtgtcatcctaaaaatacgctgcccctctcctttgcgccttttagtccatttaaaataagatacttgaagcatcacagaagccgtctcaagcacatagacaataccaataatcagtaaagtccattcctgacgaagtgtaattgaaatagctgccaacattgctcctaaggctaaactaccaacatctcccatgaaaaccttagctggtttgtgattatagacaaaaaagcctagtaaagcaccaaccatggaaatgataatcaagagaacatcaaattggttttgcatatatgcaataacactataagttagcagactgataaccactgaaatggaagccaatccatcaataccatccgtcaaattgacggcatttgaaaaaccaacaacccaaaacagaataaaaataatgtaaaacacgcccaaatgcaaaggaaaaccaaaaagatttaaggaatctgtaccgcttggtttaacatgaacaaggtagaaaacaagaccgccaataagctgcaaggtcattttttgccaagctgttagaccttggttaatttttttaaaaatctttaagaaatcatccaaaaatccaatagtcccataaattaagacaataaaaagaatagccaaggtggccccaaaagcaggccctccagtaatatgaagaacgaatgcacagataaaggtaactaaagctgctacaagaagaaacactgtcccccccatggttggagtcccagccttagctaaatgttgcttcacatcttcgtgcatttgttgtccattgatttttttcaattgatagaaccggatgaaaaatggcatggcaagaatggttaagataaaagaaataattcctgcgatgattgtagtggttaacatgttattctcctagggttattcttatttttttcaaatttttaagcttactgccaactttaacactctgttcggtaacttttccagattttttccctttgaaagttaccttgataccagtccaatcttcaaacttcttaacgtttttcttgctccagccatacatatcaggcatagtatcaaaatggctggttaatagtaaaacctgttgattttccttcaaattcgaaccaacacttacagacgttttaatgattttatttcctgtaccaagcacaattgggtgaacaagattttgacgtaagtcatcagccgtattacctgggttttttccaataacatttggtaaataatacttagtctgttgatcttcaggtgtttcaattggtgccaatagcgtatctttcattaatgttgcctcttccaaaacaggattaacaacatcttgccagaaggacacactaaatgattctggttgttgtaatgtcacatacatcaagaaatcaggattatcagatggtaccatagcaacaactgaatagatataatcattgcttccagataagtaacccgaaccgtcaccagaagcaatttgagctgtccctgacttgactgcaacagactgattgcctactttaatgactggaccacccaaactggctgaatagagagtcccgtaattagggtctgttcctactgttaccatatactgccgtgtttgtttcgctgcatcggctgaaacaggattgcctgcctcttcttttttcgccgtacggctgcttcccgttttaggatcataaattttggtgataaattgcggttctaacataacaccatcattagagacagaagtaaaggctctgagcatctgtgtctgtgtcactccaataccttgaccaaaggcactcatagcaatcgttaccatattatcagatggaaggaggcctgaggcttcactgcccattccaaaacgtgttggtaagccaaaacgatatttattgagataattaagccaattatcattacccattttttgttctagcagcgtcattcctacattactagaataagcaaagccttgagcgaaagaaagatagcctccttgcgaaataccttcattaactgaccaatctttgatggtagcgtcagcaatagacagactggcattattataagtttcgttaggattgaagaccccttcatcaatagcagcagcgagtaacatgactttcattgttgaacccggttcataattggtttgataaagagcattttgccaagaaaaatctttagaatccaaaccttcctttgtatcagaattaaagcttggtctttgtgaggttgccaatatttcgcctgttttggcattgaccagagtagcactcgcctgagcacccttagccttactttggaaagcatccatctgcgtttccaaataagtctgaataggagcagacaatgttgtataaacatctttgccatcttgagctttttttacagttgtggcagcacctagaagtgtgtttccatttttatctttttggtaggtcacttgtccgtcttttccagataaaattttatcaagagaagcttccatgcctgttgcacctactaagctcttactaccatctttattttctttaatctgagctagaccaataaattgtgaagcgaaggtcccattaggatacatacgtccgggacttgttgtaaaagcgactcccttaatttttgcatctttaagtgccttggtgacatctgtcattgttccataagtaatatttgaacctttagatccaaaagatacttgcgttagcttcttttgttttaactgagaagtaacataatctttttccatgcctaaatgctggttaagaatatcagctactttatcatattgtgaaggctgaacatataatttttcaccggaagtcgacacataagatttatcaataacagcataaatattataagtggttgaatcttctgcgatgggatttccattacgatcataaattgtcccgcgtttagcctgaactttttgaacggtttgataaacagaggacgcccctttagataaattaacaccaaatttccgatccgttccaataataataataaagttaacaatgaaaacacaaaagataaagacagacaaaatcattaaattttgtccaacacgttcacggttttctctaggtactctgcggtcgcctacaacatagtccaaaaatttctttttaaaatttttcatagactagtccaccttcttaatattatctttttgcacagtaagacctgctttttgagcaatttccgcaatacgatcatagcggctcagttcattaacttcctgtttagcattattatattcagtctctctatcattgatttggctgtttaaatggctgatttcctgctgaatttgtaggctgcgactttgtaaataaataatactaacagccagtgtgatagcagtaataataatcgcaccataaaaagccttttccaatctggtaaaggttttgattcttttttgtaaagcttgagagagagcttcgctccgtttttcatttgtcatattatttctctaatttcgaattttttgaatgacccgtaatttagccgaatgtgcccgattattttctgatagttctctagcattgggtaagatgggtttgcgatttaccaaagagaatttcggttgtaagttctctggaacaaaagggaggcctttaggaacatcaagagtggtcacttctttaaacagttgtttcgtgagacggtcttctaaggaatgaaaagtaatgacagctattcgtccatttaaagccagcaaatctagggcttgtgttaaagattcctctgctgcacctaattcatcattaacttcaattcggatagcctgaaaaatttgcttggctgggtgacccttcttctttagttctttagcaggtttagcagatttaataatctcagctaactctgccgttgtctcaatcagtttctcttttctggcactttcgatctttcttgcaatttgcttggaaaatttatcctcgccatacttaaagaaaaggcgtactaaatcacgataatcataagtattgaccacatcaaaagctgtcaactgtgcatcttgattcatccgcatatcaagcggtgcatccttcttataagaaaaaccgcgttcgcgttcatctaattgaggacttgatactcctaagtcgtagcaaataccatcaatttcgtagattccctcatcagccaagcggctttttagatgtcgaaaattatctttgataaagctgacttgaccagtcttaacatattgttgcaaacgtattttagcattatcaatggctttttgatcctgatcaaaacaataaagatgaccttctttaccaagttttgaaagcaaacactcactatgtcctgcaccaccaagcgttgcatcaacatagatgccatctggcttgatgtcaagcatatcaattgttttatgcaagagcacagtgatatgatgaaaatcattagtcataacttttattctaccacacttttactctataataaaccaaaaaagaagctatcttattatttctaagatgaaggcatgggcagtctttaaaagcagcctttctttaaatcaaacagcttctgtaacacataaaaaagcaggactaaggtcagtttataaatgaacaccacttgtcctgctctcattttcatatctgttttatctcaagcgccattctacaataaataagtgatgttttatttacattctctattcaaaattttgtctggcattcctcttgtgaacttcacttctaatcatcatttattctctaatttgtcctttaccattaatgtaaaatttagtactggttagagcttctaaacccattggcccacgggcatgtaatttttgagttgatataccaatttctgctcccaaaccaaagacaaaaccatctgtaaaacgtgtggaagcattcacataaactgctgccgcatccacttcatcttgaaagcgttcggctgcctgaatatctcttgttataatggattctgaatgatgactggtataggtattgatccagtcaatcgcttcaccaagactgttaacaatcttaacagacatgatatagtctaaaaattctgtcgcgtaatcttcctgactggcaggttgagcgtttttcaaaatcttttgtgccctatcatcagctcggaattcaactggatgtatttgattaatagccgcttctaattttggtaagaaatccgaagcaactttttcatggacaagtaacccctcagctgcattacagacactaggtcgctgcgttttggcattaacaacaatcttgctagccatgtcaaggtcagcaaactcatcaacatagatatggacattgccaacacctgtttcaataacgggtaccttggcttccttttttacggtctgaatcagacgggcaccgccgcgcggtatgagaacatctacgtagtccaccgcagccatcaactctttggcaacttcatggctggtatcttcaactaattgaactgcattttcatcaagtccaaagctagcgagtgtccgacgaatcacattgaccagagctgtattggaacaaatagcatcacggcctccgcgtaaaatgatagcatttcctgtcttaaaggccaagctgaaagcatcaacagatacattgggacggctttcaaaaatcatagcaatgacacctaaaggcacacgtttttgaatgattttcagcccaaccatattcgtataaccacgaacaacctgtccaatgggatcacctaaagcagccacatcacgaacacctgaagcaatatcttgcagacgtttctcatccaaacgtaaacgatctaccatgatagcgctaataccatgttcttgagccaaggcgacatctttagcattttcttctaaaatataaggcaattctgctaacaaagcttccgccactttaagcaaagcagtatttttcgcttccgtacctaattgagcaagtaaaaaactagccttttttgcattttgtcctaaattatcaataattgccataagctactcctttgcaaataaggttcctatcatttttccatcaagagcccgtaaaatatcacggggattggcaccgttcatcagaatcatttgacggtcacagtcaaaaatcatctgagcacttttgattttgctcatcataccgcctgtcccaaacttactacctgcaccacctgctgatttaagaatttcctcggtaatttcagttacattttctctcaaaactgcattatcataaatagttggatttttatcaaaaagaccatcaatatcagataacataattaaaaggtcactatttgtaatatttgcaactagagctgacaagcgatcattgtcgccaaacttagttgtatgatccatctcatccacactgatggcatcattttcattaacaataggcacaattctcatagataaaagggtctcaaaagtattggtcacattttcaagactttcaggaaattcaacaacatctcttgttaaaagaatctgagaaacattggtttgatagtgcgaaaagatttgagaataaaggctcatcatagctacttgaccgacgctggaaacagcctgctggcgagcaacctcgactggacgcttatccattttcaagatatctaatccaaatcccattgcaccagatgaaactaaaataacatcaagttctctattcatcaagtttgaaataacaaaagccagctgatctattttattcaaatcaatctttccacttggtaaaacaagcgaactggttccgattttgataacaattcgcttgacatgttcaaaatttcgtttcatatgattcattataacacacttttactgctctttaaacgactcaatagtagaaagatacctttaatagaactccttttaactttaaaaaatgaaatattttattcaaaaacaagtaaaataccattatgaatgaggataaatcttaacacaacactcgtataaataagcaaacggttaattttttaaaagggagtaggacaaaattgataaatcgcaatgaatgtgatgtcaattttataatccagcttttgcaaagtggacttggtattgatatgaactgaggcttatggggattagataagctttaacagtttagaaaaccgttggagctatcacttggcaagagatattttaatagtccgctggactgttaaaattttgtacctaaaaaccaagatgtgaaacttccaatcaaccactgcgttagcctaaaactactgcacaataaaagggccgaaacattgttccgccccttttattagtgtcaaaatgactgtctaatcatttacatcttctgtctccttggaaataatttttcccgtatcagcattgattgtatagttatattctgttgcatctttagtgaattcaacttcaaattccgtcaccccgtcatcaatatcctgttcaacggttagcaatgtgacttccttttcagtaaaacctgcatctttaagagcaatatgcttagcttgctctttagaaattttagtttcggtgatatcagagtggcttgtttccttatcactcttctttgttgtttggtcagtcttcgtctgagctagttgattgtcatcattgatgttatccttattacaggccatcaagagcgggattatagacatcgctaataaaagcgctaacaatctttttttcataacacacaccaccttttttctttgattgtaacctactttaaggtcactagtcaataggaaaagcaaaattattttgaaaagataagttccagattataaaaagaagcatgatgaggtatctatttaactattatctcccggcttcctaccatgaattcctttttgacgctgaatttcctttagctttgcaggcgtaatatcattgccctcttcatcaacgattttaagtccttcaatatgatggcgaatgctgcggcgatagccttcaatatactcttctcgaagtctttcctgttctagtttttcagcaccagttaatccttctgtcttcttttttcgtgctaattcattaatacgatcaatttttgtttgttccataaaaactccttctatttatttcttatttaaataaaaataggtcaacaccttaattaagaaatcagggtatgagacaccaagtcttattacatatcacatctgaacttattttgtcctaatttcattaaaagctgcgatagtattagctttctgtgccagacgagccagtaagtttaaacgattctttttcacagcctcgtcatccaccataaccattgtattatcaaagaaagcatcaataatcggacttaagacaaaaagacggtcaacattgtcagtcatatcttctgtaaaatgcaattcttcaacagcatcgaagagctcttgttcatattcattttcaaaaatactggtgtccaccatttcattatgattagacttctctgctaaattaaagactcgcgataaactttcaatagaagctttaaaatgatcctcgtcagctttttcagccaaggctgctgctgcttcaacctccagacgaacaatatgtgttgaactgtcaagaactgcttctctaatatcttttggtacagacttatcaatcattttttcaacacgaccacgaataaatgccagaacatctgcctgattttgataagtcaaactgtcaaaatcaaattgataaagattggcaactaaacgatccaaaggaatttcccaaccgaatttatctaaaatacgaacaattccttgggtcgcacgacgaagagcatagggatcgttggaaccacttggaataagaccgactgagaagaaggacaatagggtatcaagtttgtcagcaacggctaaaatagcgcctaccttgctgtcaggcagctgaccgtcactgctgattggcaaataatgttcacgaatagcagttgcaaccgcctgactctcacctgctaaagtagcatatttttctcccatgataccttgtaattcatcaaattcacctaccataccagtcaaaaggtcaaacttatagatgctagctgcacgctctatttctgctttttcttgatccgtcaaatctgcctgttctgctaaataagccgcaatctgcttggttcgcatcatatgttcatataaagaaccaattctttcatggaaagtaaccaattttaatttttcaactagatctgcaatctgcaatctttggtcttcacgccagaaaaattctccatcttctaagcgtgctaataaaactttttcatttcctttaatgacattttcaatgaattgttcattaccattacgaactgaaatgaaattaggcaataatttaccagtttgatcacgaacaacaaaataacgttggtgcgttttcattgacgttaccaaaacttcttctggcaattccaaatatttctcatcaaaactccccataaaagctgttggatattcaaccaaattcagcacttcgctgagcaatgcttcatcaatttcgacagaaacattataggttttttcaatttctctaatttgctcaataatcatgtcttcacgttctttagcgtcagcaatgacaaattctgctcgcaaatcagtttcataagaggcagcgctagcaatttgtgtttcctgaccaagaaaacgatggcctctgctgatacgcccagatttaatatcaagaaaattaagatcaagagcttcatcatccaaaagaacaacaagtgtatgaacaggacgaatatattcaaaagtatgattagcccaatgcatattaacagggaaagtcagagactgcaatacatcaataagaccacctaaaacttctttagctggtttgcctgcttcatttttagtgacataaacatattcttcgcccttgacctcacgaaattcaatggcatctgttgtcaatcctttaccgcgaacaaatccttgggctgctttagtaaaatgaccatcagcatccagagcaattttcttagccggccccttaaagtcttcagaataatcactttgctgatcagccaaatgaacaacacgaatagctaaacgacgaggagttgaaaacatttctattttttcaaaggaaagacgattggtctccaaaaactgtcccattttttgacgtaactgtttgatactcggctttacaacataagccggcatttcttcaagaccaagttctactaataaattctttgtcatgattatgcttcctcctctgccaaaagtttttctcgtgtcatttcatctaacagtggataaccaagacgtctacgttcggctacaaaggtcttggcagccacacgcgctaaattgcgaatccgtgcaatgtaaccagcacgttctgtcaccgaaacagttccacgggcatcaagcagattgaacgtatgtgaacattttaggatatagtcataagctggatgcactaagcttccctccaagcagcgtttagcttctgcttcaaatttttcaaaattctccaacagcatctcttggttggaaatttcaaaagaatatttagaatgctcatattctggctgtctgaaaatttcaccatatttaacgccaggtgcccattcaatatcatagacagaatcaacttcttgaatataagaagctagacgttctaaaccataggttacctcagcggttacaggttgtgttgctaatcctcctacttgttggaaataagtgaactgagtaatttccataccgtcaagccaaacttcccaaccaagtccagctgaaccagttgaaggattctcccaattatcctcaacaaaacgaatatcatgttctaaggaattaataccaagtaattcaagtgattgcaaataaagttcttgaatgttacttggtgatggcttcataactacttggaattgatggtgttgatacagacgattaggattttcaccataacgaccatcggcaggacgacgggaaggctcaacataagccgcattccaaggctcaggtccaatagcacgtaagaaagtgtagggactcatggtacctgcacctttttcattatcataagcctgcatcaacatacaaccctgatcattccagtattgctgtaacgtgaggataatctcctggaaggttagtttttttgacataatttactctctttcttaataattatatcttgcgacatttccttttaaaagcgatattcttttgaaaaggaaacaagtgcatagactaggtacatagtaattatcgttaggtgcttaaatctttaggattattagcaactttggctaggtgaaaggtttgttctttagacatttcgtctctcttttttgtaaaatagctgacgctgggaaatcaaaagagccacgctcaatcactcccatgccaactgacataggggcgtttgaaacgcggtcccaccctaatttattacttcatttatctgattgttagcttggctattagccaagagaaagtgccagtccttcattttgtttcacctgacttacactctctcaggttcgctgcagaaacgccacaaaactctctttcttaacaaagattatagcaaaaaaggtcaagcttgtccagacttactccaacttcatggcgttaaaaatatacataaagaaatctcggctgacttcaaaatgcccgtagcgtagctggctggcataggttttccagtctggatgctgtctggcggtttcaatcgggcaaggctggacagacctgtaatactcaacatcccgcctgaaagggataaagtccggtgccatttcaaattgataaaccctatcatccttcatcttacccgcggctgtgaaagcctgcgacttttgattagaatcaagagcgattttaggactgtaatagagcaggtaatcgccctttttcatgcgtcttaaaggaccgcctttaccatgacagacctggcaaaaaccgccgtcaacaccgcgtttaacatgattttctgaaacaacaccaacccagaacttaaccatgattttcctccagttttattaaaagccgattgaaaaccgacagctgttcttccagctgaccaaagtaggtttggtcaattgcctcaatgagaggcagagcctgattcatgcgctctctgcctgcatcagttaggaaaacaactttggctcgactgtcctgcggatgttcccgacgctcaactaagccttttttcaacaggagcttaagaatctgagaaaccgtcatcacatccatatccgaaaaagcagctagattgacctgagtaatcaggtcctgttgcagctctaaggctcctaaactggtcagaataataaattgcggatgagtcagccccactttttgcagagctgcttttactcggccatgccaagcattgtaaactcgtgcgaataagagacctgtcgattcctgatggttgtcagcatactgggaatgaaaagtttttgtcatactgtctccaagatttgtttcagctttccgacactttcgggcacatcagcaaaaatctgtttcaaaaaggctaaagcctcctttgtcgtatcgctgtctgtcaaagaaactgaatgccttagactaatggtaccgtcaggattttcaagtatctcatgttcaaagaggacattgccaaaaggcgttgctgttaaatcagaaaaacactgattctcacgcacctcaactaaagtgaaggcaagttcaggcatatcctccatcttcattttccccttttgccctgtagtgaattcaccctccaaactaatttgttccaaatcaccctcccagacaaaccactgattaacttgagaatagtaggtccaagcgtcctcttttttagcattaaccgccaattcaaaagaaaatttcataaaaaacacctccatatttaataaatatttatattataagtctacttacaatatttgtcaagagaaaagaatgagatagacagccatgtctaataagatttttgctttttccaatatcaatcctcacgattaatattaactcccataacagtcaagtgaccattgctaatgagtttaatgaccaaacgagccaattcttttgcaggcatatcgaaatcagactggatccaccacatcaaagtcccaacaaaaatgctggtcaaataagcaacaataaaatctgttggtacgggttccccagattctgtgacattaagttttgttaagagatgatcatatttttgatgcaataattgactgaaatcgttttgaagaatttcttgagaaatattttttaaaacaattttagcaatagagggatttttttctaaactgtgataataatgacttaacagactctctgcttttttgaccttgaccgtatcatcagtagtaacttgcgctgcatcaatcatatcggacagctgctcaatcatttgtttttgaatgccttgctgtaaggtatccttatcggcataatgagaataaaaggttgcccgattaatcatagcctcatcagcaatatcttgaatagtaattttttcataaggtttgttactcagtaatttaacaaaggcatcaaaaattaatttttccgtccgcaaataacgaatatcagtaaatttcatgacattatcctccttagataaacaacaaaacgtcaattgccgttgcctaaacaacacaatcataaaaattaacgattgaatttgatatttagagatttataatagcattataacaaacggactgtttgataggcaacaatctgttgtattgtcactgtcattccgttgataaaaatgtgactagaagggaaaactgcaggctgaaattagaattaagaagctcttttctttacaaatcagtttaaaattctacgatttacagtcaaactaggtatttttatatgtataaagctggtattgatgtcggttcaacaacagttaaggtcgttgtctttgaccaagattatcatttaatcttttcacgttatgaacgccatttttcagacgtaaaagcggcaactatcaagataattcaagaagccatatctaaaatcggtaatcaggaggtctccattgccatcactggttctggaggtatgggactgtctgatgcggctgaaattccttttgtccaagaagttatcgcagcaactaccaccgtggaaaaattcattccacaaacagatgtggttattgaattgggcggtgaagatgccaaaatgaccttctttggggatgccctcgaacaacgcatgaacggaacttgtgctggtggtacaggagctttcattgaccaaatggcagaattgctaaaaacagatgctaacggtgttaatgaattggctaaagagtatgaaaccatctatccgattgccagccgttgcggtgtttttgccaaaacagatgtccaaccgctgattaatgaaggagcccgtaaggaagacattgcggcttccatctttcaggcggtcgtcaatcaaactattgctggactagcttctggtcgtaagattacaggtaatattgcctttttaggcggaccgctctttttcatgagtgaattgcgccaacgcttcattgaaactctggatatcaagtctgagaatgttattttcccaaaaaatcctcaactatttgttgctatgggagcagcccttgatgaaaatcaaagccaattaaaattatcacaaattattgataaccttaacaataatagttctgattctcttgtacctaaaagcactttagatgttctctttaaagaccaagatgagttagatacttggcgtcaacgccacaatgaagctagtgctcagcgtaaggacatctctactgcttctggtccagtcttcttaggaattgatgctggttctaccacttcaaaagttattttgactgatcctaatggtaatattttattcgagcattacggcaacaatttaggacaacccttagaaaatatcattgtcatcctcaagcaagtataccaagaattaccaagtactgcttttatagccaattcttgtgttactggttacggagaacaccttatcaaggctgctctgcgagttgataatggcgaagttgagaccgttgctcacttcaaagctgccaattattttaatcctggtgttgatttcattttagatattggtggtcaggatatgaaagccatgtctgttcaagatggggcgctctctagcatccagctcaacgaggcctgctcgtctggctgcggttctttcattgaaacctttgccaaatctctcaaatacgatgtcaaagattttgctaaagcagcccttttggctaaacatcctgtggatttggggtcaaaatgcactgtcttcatgaattccaaggtcaaacaggtacaaaaagaaggagccactgtcgctgacatctcagcaggactttcttattctgttatcaaaaacgccctttacaaggttatcaaggtcaaacggccagaagatttgggacaaaagattgtcgttcaaggcggtactttttacaatgaagctgttcttcgagcctttgaattggtctcaggtcgtgaagtcgttcgtcccaatattgctggacttatgggagcctacggctgtgcccttattgcccaagaaaagtatgaagaccatgctcagccatccaaactcatgcaattagaagaattaacagcattcaaggcagaaaaagaattcactcgatgtggtctttgtgaaaataattgttccttgaccgttactatctttaacgatggctctaaatttgtgacgggtaatcgctgtgaacgcggtgccgaaaaagtcaccaaaattaaatttgaccgcagcaagcaaaaagaaaatttggttgattataaatacaagaagctttttaaattcaaggccttatctaaacgcgatgctaagcatggtgtgatgggaatccctcgcgttctcaatctatatgaaaattatcctctatggcatactatcttgaccgacctaggatttcgtgttcaaatttcaccaaaatctgataaaaaactttatcaaaagggaatcgaaaccattccaagtgataccgtttgttaccctgctaaaatggtacacggtcatattcaagctcttattgataaaaaagtagaagccattttctatccaagtgtcatttacgaacaagtcgaaaataaacaagcacctaatcattacaactgccctattgtccaaggttatccagaactgattgaaaaaaatatggaccccattcgtaataaagaggttaaatatttccatccctttgttaatttagctgatccagcaagtgttgtccaagcacttgccaaagcttttgcagattatgatgatataacgaacgagcagattcacaaagccgttgaacatggctttcaagctttaacggatttcaaaactgacttacaaaccaaagcagatgaactcttagcacacttggcaatgaacaatgaaaaagctattgtattgtcaggtcgtccttatcatcttgatccagaaatcaatcatggtatcgctaatatcattactcaggaaggtttccatgtgctgactgaagatatgatatcgggtcttgaagaggttgatggtttgcgtgttgtcaatcaatgggtctaccattctcgactttacgccgctgccaaggtcgtttctaaaaatcctaatttggaactggttcagcttaatagttttggttgtggtcttgatgctgtcacaacagatcaagttgaagaaatcatgcgcggtcataacaaactctacaccgttcttaagattgacgaaggcagcaatatgggagctattcgtatccgtctgcgttcgcttaaggcagccgtgaaagaacgtgaccaaaaagtcaaaaaggctaagcttgatcacattttcaaccaaacaccacaatttccacagaatctagaaaatgaagaaagcaaacaaaggcctgtcttcaccaaggacatgaaaaagacccataccctgctcatgccaatgctatcgcctattcatcaaaatggtctcattgaagaagccttcaagcaatcaggttacaatgttgtcatattgccagccatggatcgcaaggcagttgacgtaggattaaaatttgtccacaatgatgcctgctatcctgctattatcactattggtcaattagttgaagccctacaaagcggtcaatatgatctcaacaataccagtgtcatgatgacgcaaactggcggcggttgtcgagcaaccaattatattccgcttttacgcaaagctcttaaggacgctggttttccacaaattcctgttgtctctatttctatgggaaatcaaggaactgaagaaacaccgggatggaaacttaactattcttttgtcaaacgtctgcttatcagtgtgctctacggcgatcttttcgaacgcttactctaccgcgtgcgtccttacgagtctgttaaaggctcagctaatactctttatgacaaatggttagaaattgctcgtaaaaatgtcaaatcaggttcttactttgaattcaatcgtaatatgaaacgtattattcgtgagtttgacaagctggaaacagttaattttggacaaaaaccacgcgttggtgttgtcggagaaattttggttaaatatgctccaacagccaacaatgacatcgttggtattattgaaagagaggggggtgaagctgttgttccagatttgattggttttatgaattattcactgtttaatcaaatctggaaagctgatgaactcaatatgagtcaaaaaacaaaacgcttggctaaactaggtattgatgctattaacctccttgaaaagccaatgaataaagcacttgaaaaatcggaacgttttgaaggcattgagtctatttataacattgctgatagtgcttccaagattatctctattggtaatcatacaggtgagggttggttcctgactggtgaaatgattgaactgcttaataatgatgttaaaaacatcgtctgtctgcagccatttggctgtctgcccaaccatatcgttggtaagggaatggtaaaagaacttcgcaggcagtataaaggggctaatatcgctcctattgactacgacccaggttcttcagaagtcaatcagctcaaccgtattcgtcttatgatgacaactgctaagaaaatgcaaaagaccaaagtcaatgcttagtttaaaaataagtctaaatgacaaaccgtttttgtcctaattttttatcaactattaaaaaaggctggaatgtcgttcacaaaacgacttccacgcctttttctttttataatcatctttctttacttgcctttattgacattcataaacttttttacctgctaaataagttgcgcgtaagttcatctctttatccaacacgataaaatctgctaggtgtccttcttttatttgaccgcaaacatcatctataccaacagatatagctggaataagacttgccatcataatagcatcagctttagagacaaggccccaatcaacaatatttttgacaccatctttcaattgcaaaatagaacccgccaaggcaccatttgatttcaatcgagcagtgccattttcaacagtaacagggtattctcccaacatgtaatctccatcaggctgaccgccagctgacatacaatccgtaatcaaaaccacatgatcaggtcgcttttgatgcagaagaatgtcacaaacacaaatatgcacatggtaaccatcacaaatcaattcggcataagtattaggtatgttataaacagctccgaccatacccggttcacgatgattgagcccccgcataccattataagcatgcacccaaacagaagcaccagcttcaactgcctcaacagcttcttgataggtcgcatcagaatgtcctaaagccacaacaacccctcgcttgcatgcataagagataaattcagctgttccttcacgctcaggtgcaagggcaatcttctttaagagtcccttggaacttgctaaccactgatccaattcactagttgagggatttcgcatataagaaggattttgcgcacctttatacttttcagtgaaataaggaccttcaaagaacagaccttgaatgcgagcacccgtttccttacctgcaaatttggctgtcgtttgacagactttatttaaagtttcaaaggaagctgttagccctgttggtaaaaaactagtcacaccagccgagagcaattctcgactcattgtcgctaaggattcttctttattatccattacatcggctcctgcaaagccatggatatgtgtgtcaacaaatccaggcgcaatttcatatcctgaataatcaagcacttgagcaccttctggaacagtgctcagccattttccaaaagaatcatcaactagttctaaataaccacccaattttgtttcataaggataataaaacttatttgctttaatgtatgtcgtcactttacacctccatattgttactttcattatactcttattaataacagttgtaaatggtatataccaaatttcttctttaggccatcagcaaagcttcataccaagcaaattaattcctgttctcttcaaaaaccatcgaggaagccgattatcataggcatattcatacctgtataatatagccttccagcaataatttaaaataataaaatgtgctgtcccattaaagctgccaaccaatataatcttcctcatgattaaataaggtcaaaaatttcattttaaagccttcaattcctttttatgctatctagcttctcataatcaacaataaaaaaacaagagaaattactcttgttttttatggcgctcagataagacctgattaatcttttgtgttttcaagtaaatatccaaacgaacacctccccaaataataatataaataagaataaagtcaatccagaaacgcggcaaagccaaaatatctgcccagccattataaatcatcatggcagacaccacaccaagagtcacccaaaaatgaatgattaaaagctttaaaaaggagaagcgttcactttcgaaaatcagactaataacaccaatacaagcactcatgataaaaatactgacaatattacttttagaaacgggtgacttttgaacattaaagagcagaacaagcaagtagactaagctgcctgtacggattcctgaaagtatgttgctaacaattgttttcatctttctttcctttctaaatgcccagctgagtcattaaacctttaacatacttgcgactgacgcttgatttgatattactgcttaactttgccatcatgttccccgaaaaactgtctgacagagattccagatggtcaagattaatcagggcatgtttggaaatttgaataaagttagatttattcagacgattggcaaaatgaaccaaggtctcagtcgtggtaaatacacccgttaaagtataaattttaagtgtcgtctgatttacatcaactaaaataatgtcatctagcttcaacatcataattttatccatacttttgataggaatagaattactagatatcatctgatagttgctgatataatccaacaactgttgaatagcacttgtcttttccgccgccttgactaagacaagggggctgtcagtcgaaatttgtgaatcctgttcgaattgactttctaccacctatttttcctctctaaatgagggcttggtattttcgcaaagcattttgtaaacaaaagatgagaacaccagccactaagatacctatcactatatagtaagtatcagtatttgtcaataaattttgccaattcaagcgaatccccatcattttttcaaaatgctctctagcatttgcttgactaaaattgtctttaagagtatctgacattaaggtttgtctaaataaagaagcgatataagcacccggagtcagcttcatgatggtttgcgctgtatctggcagggcaccgattggaacataggtacctacaagaaatcccgaggcagctccaaaaatagtagctagtttcccaagattatcaaccgattgaatgcgattcacgatcagagcattaatgatggttgaaatcagtgtatttaaaatcatgataaagataagctgcaaaagaacagtccaagaaagtgttaccttatcagtaaaatagaaatacgttcccataatcgtcagcataatagcctgcatgataaaaccaacaagagcagcgctgataatataacttaaagaaagaggccaataacctaaatctgtaatcaaaagatcttgacggacatgactttctttgtcttttgtccattgtgaaaggttagataaggttgttgtaatccccgtaatagccaaagttccaccaataagccatgtatctaagagttgattggtattgtcaatttgagaccaagaagattcaatattatcctttaaaaataccaaataaagaataaaagaaatcagagcacccagcagtgagaaaaccacaccgctgcgattgcggaaatagagcaaacaattacgtttaaccaaagccaacatttaacgtacctcccgtccagttaagactataaaagcatcatccattgtgccagatcgaaattcaaaattatcaatcaaatcacgacaatcattaataatatctaaagccgattgagctgtttcaggttttaaaatgatttctccttcattgaccttttcaatcaaggaatcatctctcagataatcaagtaaaggatcaatatttcctgtttgtagtttgagaatgtttttagcatattttcccttaatttgattggctgttccttgggcaataatttgaccatgatcaacaatataaacctgatcagcactgtctgcttcatccaaataatgtgttgtcagaacaaccgtcattttttgcttttcctgaagcaaattcagcaagtcccagatagcttctctcgtttgaatatcaagacctgttgtcggctcatccaaaaagagaatgtctggattgtttagcagagcacgcgcgatatcaacacgccgtttttgccctcctgataggcttccatattgttgatggctaaaattggtcaaacctaattggtcaatcaactcttcgactttcccagaagcaacttgcttatactgacaagcacgaatttgtaaattttccttaaccgttaacatttcatctaagacactgttttggaaaacaacaccgattttaatttcttgagcataatgaacactccctgaatctggctgtgatagcccaatcagcatttgaatggtagaagatttaccagcaccgttaggaccaaggatagccgtaaaacttcctttttcaatttctaagttaacatggttgacggcaatatgttgaccataagttttagtaagatcttgtgttttaagtatcatcataaatatcctttcttaaatattctgaccatagtctatcaaaagcaaaaataaaaatctcggctttttggataagaggttaaaataactagataagatgtcctattcggaaaacgaaatactttctgctttgattctttttggcaaatcttgctaggcttggtttttcctctgctttctattataataagattattatttaatactcaaaaaattcaaattaaactaggcgacgagttgcaggccatactaacgtacagcaaaacgaagttaacaacctatcattttgatttttgaagagtattaatttttgacaatcaaaaatggtaactttaatgattcttccaattgcaatgcttttttcagccctcggtgctttttgcctcgcttattcttcttttaccaaagagaaacagcacatgctactttggcaaatcagcgactatatttttacgattattgctaatcttttactgggtggctatacaggcgccctaaccattagtgtttccatcgtcagaaatgcacttattcttaagaaaaagaatacaaaagttattaccatctgtttagtcctcattcaaattgctttaggtacttatgtgaataatttgggcttagtcggttacttgcccattatttcttctgtctcttacactttgacaacctttttaacatccaaaatgcaatttttgcgctggttgattattgaaaacatgtctctctggttcatttatgacctcactatcaacgcctaccctgctgtttgcatggatattttgatcattctctcaacactgctggctttatataaacatcgaaaaaaagcaggacattccttgtgagttggctttgtcctgcttctcattttttatttaattgatcctgaactttctattttctagtgttaagcagataaaaacgatttcccagttcctttttcatgatttatcacttatttaagacatacttggcaatagcttgagcaacaccagcatcatcattagaaccagtcacaaggtctgctgcagccttaacttctggactagcatttcccatagccacactgaaacctgctgctttgagcatttcaagatcattaagtgcatctcctattgccataatatcagtccttgaaactcttaatttctgagctaattctttcaaaccagtagcttttgtaatgctttgaggcatcacttcaaaaatgtaaggctgacttcttacagtagtaaatttttctgctaatttgcactcaaatttttgctggaaagcatctaagcgatcgctctctcctaaatacatagcctgaaaaactggtttagcagcatgctttacatcatttaagcccacagtctgtgcttgcgtaaataccagactcgcatcataagctactaattctgatacttgatcagccaaaaccagataatccctatcagcagtcaatgttaaatcgatttcaggataaccctcaagcaaatcatacaaataagatactccattaaagtttaaatcatgataagtcagtaactgccaatctctattaatagtgtgaagagagcagccattatttagaatcgcatattcttgttcagcagctaagcctaattgtttaaagtagggctcaacaccagtctgcatacggcctgtgcaaagaacaattttatagcccgaacgagctgcttcttgaataacagcaatattttcttgcgggatttctttttgactattcaaaagcgtgccatccatatcaatagcaatcagtttaaccataatcatataaccttttctaaaacattccactatctagtgtatcacaaatcaaggaaactggcacagcaagttattataattctgtatattctacaataattgaaacagataactatgacaatgctataaattcattttacagcagaaaaaaaactggtttcccagtcttttccctctttgtgaccatctgataagatgcaatgaaataactgtgtctttacagtttttaaggtatatgaagcctacttaaatttctgctcccaattcataattggttcctttcagtgctcgtttaagagaccacttgcttggatttcctgtaatcctgacttcttttttatcaaggtcaactttgacatcattgactttctttaattctgaaaagcgtttggtgacattgtcagcgcagccttggcattttaagccatcaatatgatatgttttttccatgataattctcctttataattttacaactttaagacgcagggcatttagaacaacagaaacagagctaaagctcatggctagaccagcaatcattggatccagcaaaggtccgccaaagagataaagtactcccatagcaataggaactgacagaacattataaataaatgcccagaaaagattttctttaatattaataatagtagcacgactaattttcagtgccttaataatatcaagcattgcaggtttcatcaagacaatatccgcggactccatggcaatatctgttccagagcccatggaaatgccaatatctgctgtcgcaagtgccggagcgtcattaataccgtccccaaccatggcaactttcttgccttccgcctgcaaatcaagaatggcctgtgttttttcctgcggcaaaacttgactgataacaaaagtaatccccacttctttggcaatagcctgcgcagtttcttcattatcacccgtcagcatggccacttcaacccccatattctgtaaagctttaactgttgctgcactgtcattctttaccttgtccgcaatcgtaatcagtcctaacaattgaccatcactggcaacaaaaatgggtgtttgtccctgagctgttgctgccttaaaatctgcttgagcctgttctagagagatattttcttgacgcatcaatttttcattaccaacaagcaaagtttcatcagcaacacaacctttcagtcctagccctgttagagaagtaaagtcttccactgcaagtaaacgagtcccttcttttttagcataatcaacaatggcctgactaaggggatgttcagataatgcttctaaggaagctgtcacttgcactaaatcagttcgatcatgataagaaaattgatgaacaacttctggtttaccttgagtaatagtgcctgttttatcgaaaacaatcgtattaatctgatgtgccaattccaagacatcaccacgtttataaaggattccattttcagcagcacgacctgtaccaaccataatagccgttggcgttgcaagacccaaagcacaagggcaggcaatgacaagaacagcgacactgattgtcattgaaaaggtaaagtcttgtcccatgacaaaataccagaagagaccagtcaaaatagcaatcgttataataacaggtacaaagacagcagataccttatcagcaatcttggcaatgggtgccttagtttgctgagcgttctcaaccaatttaataatttgtgaaagcaaggtttcattgccaactttttcagcctcaaaagtcagacttccctgaccattgattgacccggcataaacagggctatccgccattttttcaataggaatagattcccctgttaacatggattcatcaatagcagaatgccctgacaggactcgaccatccacaggtattttttcaccgggtttgactaaaattttatctccgatttgcacttgctcaataggaaccttaatctcctcgccatcacgtatcagagtagcctctttagcagacaaatgcattaatttttttatcgcatctgaggttcgacctttcgatagggtttcaaagtatttccctaaagtaatgagagttaaaataacagctaccgattcataatagagatggtgagcatgatgtgtatgtcccaagtaaacatggtaagttccataaagactgtaaagaaacgccgctgttgttgctaaggacactaatgagtccatattaggatgacctttaaaaagcgatctaaaaccattgtcatagaagctccaacttaacacgataaccggaattgtcaaaagaagcaaaaccatcgcataagtgagcggagcactgcttggtgctaaaaagttaggtaagggcaagccaaccatacttcccatagcaatataaaagaggggaatggtaaaaatagaagtccacaaaagacgttttttaatacctgctaacttatgttcttcacgatcctcctgactttcagccgtcgttgggtcataaactttagcgccatagcctgcaccagcaactgccttagtaacatctgcttcactaaccttagcggcatcgtaatctatcgtcattttttcagttgtcaaattgactactgcactttcaataccgtctagttttttaacggcattttcaacattgatggcacaagaggcacaggtcatgccatctatcaaaaatacttcttcactcattttgatgtcacctccaaatgttcatggcaagaacattgcccgacaatacaattacacttaacttcaggcacagcatttgcttttttggacaatagcagagcttccaatttttcaatatcagacaaagtcataggcgtttcctcaattaagtgtctaatcaaagcttgatgcttcgtgacacaaatgcgcgagaaaacttccgacacttgctgctctaatgcctcttcttctgaaatcaaactagaatagatgtattttcttccttgacgctgactggtcaagtagcctttttctgataaacgcgtgatcagcgttttaatcgttgaagcggaccagcaataagtacgacttaagatagcaataatttcactgctgctagtcatctgcttagcccagacaacacgcattacttcccattccgcatttgaaatagttgtcatttgagctcctttcatctacatttgtagatatattataacctctttgtctacatttgtcaacaaaaactgatttttaattttttgacaaaatatgaccctacttatcagctttttaaaagagcaaaaaaagaggcgagaaaccttagtttctgcctcttcactcaaacaatgaacagttcttcaataataatttttcaaaatgatacagtcctcattagctcttatgattcttgttaattttaaaccataagactaacaaacctaacagacctagtaaattaatgctataaatgattggcgagagctccttaaaaagattttttactgccataaataacaagaataataaaggcagacttccgatcaataaggatcttctatttttcatgttcaacaaaaagtagcagcacctacagctgctccagaccagcctcctaaagccgctccagatactgtaccaacgactgggagagtaactgtaccagctcccataccccctacaaatcctaaacctgcagaaccagctgtgccaagtgcacatctaatcataccaccaccctcaacagttgaaagtgcttcattatccattacgttaaattgttcaaatgcttgtgtattcatatgatagatacctcttttccatttttaattttttgtctggttagccaaccgacatctctaatatagcaaattatttttcaaaatggagcaaaatatcctaaacggtagctattttgtcctaaacggttaaaaatgacgttataatgcctgtaataatagtcaataaaaattaaaaatagttttcgcctactcgcatcgcaactgactacaaacatactggagcacgacaagctcaaaaaagtcaaaaggcttgggaggccttctgagatggaaatagaagtagataagctgatatcgtcagcacaacaacctattgttccgatttttaaagagtatagacaggcctacttcgaaaataatcgttttttggttgatggaaaaaagccttcattggacttataatcctaacgaaggcttgacacctattttcgcacttttacagcaattaacaagcagacagaagaaacttttttgtttacttaatttcttttttctaaatcccgcagcatttggtcaatcttattaccatactcaatagattcatctttgataaaagttaaatcgggaattttatacatggtcaaattttttccaagttcacgtttaatggtccctttagccttttcaagacctatttgaactttctgattatcagaagcaaggtcactcatgatagtatagtaaacctttgccagagataaatcacctgacatttgaacatcagtaatagtgacaccttgaacacgtgggtcacgtaccttcttttgcaaaatctcattaacttcgcgcttaatttccataccaacacgttcaatacgatgattagacattctcttttcctttcttttaattttacaattttcttttttcaccacgacaaaaaatatcttgtaaaagctcacttcattcgctcatcttctgaaaaaagctaggccagatgacctagctttattgtttatctttgaatttcaaaagaaatcatatgacgttcatctaaggcaacacgacaacgactgtacttgcgtatgcctagaagtgttaacaaaggagtaactaaatattattatcttttaatttcttccataatgtaagcctcaatagtatcatcaattttgatgtcattgtaattttcaatcatgagaccgccttcttgaccattaccaacctctttaacatcatctttataatgtttcaaactagcgagcttaccgtcaaagacaaccacaccatcacgaataacacgagcacttgaatcacgcgtaattttaccatttgttaccatgaagccgccaatagttcccactttagaaactttgaaggtctcacgaataagcgcttcaccaataattttttcttcaaactctggatcaagcatacctttcatggcatcttctacttcttcaattaccttataaataatggaatgcaaacgaatttcaacttcatctgcttcggcctgctgacgggcctgtggagttgggcgaacattgaaaccaatgataacagcattagaagcttctgccaaggtgatatctgattcattgatggcaccaacagctgagtggaccacattaactttcacaccttcaacgtcaatcttcaaaagagaggctgcaagagcttcaacggaaccttgcacatctgctttgataataacattaacagatttaacctcaccggctttgagcgtatcaaagagattgtcaagactgacacgatgagtcaattgacgttgtttcagcagggcacgtttagctctttcttccccagcagcacgcgcagccttttcatcctcataaacggcaaaatggtcacctgccattggggcttcattcaaaccagtgatagagactggcgttgatggagcagcaaccttaacacgacgtccaaggtcattagtcatagcacgcacacgtccaaatgtgttcccaacaacgattggatcttgaacatgcagcgttccttgttgtactaaaagcgtcgctactgcaccttttcctttatcaaggcgagcttcgataactgtaccaatagcacgaacagttgggtcagctttcagttcttggatttctgctactagaagaacagtttctaaaagttcttcaatattttgaccgaatttagctgaaatttcaacaaattcagaatcgccgccccaagcagttgaaataacgccatactcagctaactcaccgatgacacgttctggattagcacccggcttatcaattttattaatagcaacaataattggaacatcagcagctttggagtggttaatagcttcaatcgtttgtggcataacaccatcatcagcagctacaataagaatggtaatatcagttaccgaagcgccgcgtgcccgcatacttgtgaaggctgcatgtccgggtgtatcaaggaaagtaattttctttccaccttcttcaatttgataggccccaatatgttgggtaattcctccagcttcacctgtcgctatacgggaattacgcaatgtatcaagcaatgttgtcttaccatggtcaacatgccccataatcgttacaacgggcgcacgttcaaccatatttttcggattaagataatcatcttcaacgaagaaacgttcaatatcagctgtatcaacttccactttttgatgtgcttcaatgccataatcaaccattaggagttcaatcgtatcagcatccaaagattggttttgagttgccataactcccatcataaagagtttttttacaatttcggcaggctcacgcttaattcgttttgcaatttcagcaaccgtcataccttctgtatactcaaattcctttggtagttcatggaatttgcgttcagtcacaggtttcagattggcattatgattacggttatttttagattttttatttttcttattccaattactatttttttgatttctcacttggttttgtttattccgatttttcttatgtttattttgttttggtccgtcttcattctcatgtgaaaaatcacgtgatttatctgggcgagcctgttttttgcgacgtgtatccacagctgctggatgtgtcacttgttcaactgtctgaggctgagcttgtggcgctgcagttgctgcagcttcaaccgtcggctgctctttctgatttagcttcttagctttttctttagcttgagcggcttgacgtttagcttcttgagcttcatgaaaacgtgtttcactctgacgcgaatattccgcattttgttctgcttttaaggctgcagcacgtgctttgaaatcaaaacgcggtcctgtcggctgggattttgatgcttcttgtcgattttgaaaatgattacgattatcgcgacgattgtcattttgacgattgcgattattgcggttatcattacgacgatcttgggaaccatgattacgattgtctttttgccgattgttctgtcctttattttggtttcgacgttcaccattattttgacgacgttcagcctctgctttggcacgcgcttctcgttctgctttaaaattacgattttgcggtcttggacgccctgcaggctttgtagcagctgctttaggttccgctgcaacagatccttcttgtgctttggcttctttctcaactttagaagttggagtaacagccttgggttccacagagacagtaaaactttctactatacgtttagcatcactttcttccacgcttgaagcatggcttttaacttctaggcccaatgattttgccttttcaacaatttctttactttctttgccaatttccttggcaatttcgtataatcttttcttcgacaaatcttgtcctcctattctttttattccataaaggtcctcattttctttgaaaatccagtatccacaatagcaagaacttttctgtttctgccaatagcgatacttaattccagtgctgaaaacactgtggagacttctatattataatagttacttttatccgttacttttttagttagattcgaaccagcatctttggctaaaaagatgagctgtgcctgtccagtttgaatagctttaacaactaattcttcacctgaaataacacgtcctgctctctgggccaaacctaataagtttgataacttttttgaattattcaagacctaactctcttcttttaaccttatgatcaacaaaagcaattaattcatcataaaagctttcaggaatttccatagaaaaactgcgattaaagacttttctttttttagcttctaaagcttcttcgttagcaagtttaatataagcccctcgcccatttttcttaccagtaggatcaataaaaacatcaccttccttggttttaacaatccgaagcaaatcacgtttatcaataatctctcctgaaacaagagactttcttaaaggtatttttcttgtctttgccatcaaacacctctgactttctattttgcatcttctgctgcaaattcttgagagagttcagaaacttcctcagcaggagcctcttcataagtagcctcttgggtttcatcttgtgctacccactcggcttccatttcttcaaattcactagcagacttaatatcaatacgatagccagtcaaatgagcggctaaacggacattttgaccacgacggccaatagcaagtgacagcttattgtctggtacaacaactgttgcatgtttgtcatcttcttcatcaaagagaacttgatcaacctcagcaggagcaacagcattataaatgaattctgctggatcatcaacccactcaataacatcaacattctcttccattggaacccaaagtccagttttttgatcaaaacgtttaggatggaatttactggtcactttcttaatgttggcacctttgcggccaactatagttccaatagcatcaacattaggattatgactgcgaaccgcaaccttcgttcgatcaccagcttcacgtgccacgctcataatttcaacagtgccatcaaaaacttcaggaatttcctgttccataatacgcttgataaattcaggatgactgcgactaacgaagacattgacgcccttaggattgttttctactttataaacataaacttcaatgcgatcatgagaagcaaacgtttcacccggaacttgatcttgacgtgacagctgtgcttctatcgttcctaaattaacatagataaagcgattatcaaaacgctcaacagtccctgtcatgatttctctttcatgctctttatactcattaaaagtgacttcacgcatttgacggcgcattttttccatgatcgtttgtttagctgactgggcagccacgcgaccaaattccttgggagactcttcaaaacgaattttatctccaagttcataggctgtactgatcgcaagggcgtccttcaagctgatctcaaggcggctgtcaaaaacttcttcaacaacttcacgaacagtgaagactttaaagtctcctgacttttcgtcaaattcaatctcagcactttctgcctgcccatagcgacgtttataagctgactttaatgattctttaaccgcatcaataatatcatctttgttaatgtgtttttcctcttccagaatacggaaggcttctagcatttcttggctcatagttgtttctctttgtcttgcaaagatcttcctttctatagttttacagcaagacgggctttggcgaccatcttataggggatagtaacagttttctgctgtgttttatctaaataagtcattgttagtgtttcaccatcaaaggcagtcaaatcaccttcaaaaactttgaccttatcaatagcttgataaagactgacatttatataatgaccaacagcattcattaaactctgggcagtttttaaggggcgttctagaccaggacttgaaatttccaacatgtattgttctggaaatggatcaggctttatagtatcaagcaaaggactgataatatctgtcaaatcagctgtatcttcaaccgtaatcccttctggtttatcaactaaaatactgagtacatagtttccacctaatttttcatactcgatatcaaccaattcaaaaggttttggaatgacaggtgcgactactggccttacaatatcaacaagcgttgcgatagtatttccctccttacacacataaggagcgaagttgtgacttcgctcctttctgtattatttcttcttattatagcataaataaggaaaaaagcaaggctaagcgttaatttatgctaattatcaaaggagaggaggggattcgaacccccgagccccgttaaggactacacgctttccaagcgtgcgcactcagccactatgcgacctctccatataaactgaacaagtgctcagttatattgataactgtgaacagacagctatatttctcaaggaaacatttgatctcttaaaatcgtgcttcaacacgatagataacttgacctttttgagaaaatttctcttcatattctgtcataacgttattttcataatcactagcatgcaagtctaaccagacctgctctaaaatcataccatattgtgagaaacttgccaagctgtattcaaaaagtccacgattatctgttttaaaatgaatttcacccttttctggcaaaattttcttataagtatcaagaaaacttttataagtcaagcggcgtttttcatgccgttttttaggccaaggatcactgaaatttaaatagagaaggtcaatctctccatctgcaaaataatgcgtcaaactagaaccatccgccaacattaatttgacgttgggaagctgactgtctagaactttatccaaagcatggctaagaacagaaacctgaatatcaatccctatgtaattgatctgaggattttttgcagccattcctgtaataaaacgacccttgccactgccaacttcaatatgaatgggatgatcgttgccaaaaacttcctgccaatgccccttgacttcttctggttttaaaataacatatcgaggattgttttccagatgctctttggcgcctttgcgtcttctaactctcatactccccttctaaaaggattctctaaatttacgtaattcatagatttcctgattgacattttccatgtctcgattttcataatattttaaaatttgtgataaataagacagttgcccgtaccattttatcttttgaaaaaccttagtattttgcttataaccataatagctcagccattctgcccaacgcgtatgtggaatataatggcttaaaatatgagctacatcatacatgcgatctgtcactcgaacagaatcccaatctactaaataaaccaaaccactggttgtaatcacccaattgctgtgtctaacatctccatgaacaatagttgcatagtcttttttgaaatcaggtaagttgcgcttcatttcagcaacaactgattgcaaataggcattttctgaaatttggtaaggcgcgctgcgttcccatgatagaagcaaatccaaaggtgtctcaactttataatttaactgaagtaactgattaaccaagggtttcgacttatgcatttgcagcaaaacttgtataatttgcttactattcatatcagctctggttaaaagtctgccatccagccattcctgagcactcatcatatcgccattacctaagcgttttgcccataaaagctgaggagcaatctgctccttagctaaggcagctaagatgggagtagtattgattttaacaaaaatcttatcaccatttggataagttccgatataagcttgaccacttttgccctttaaaggcgttaaggttaaatctttatctgattgtgccaaactttctccctccttttcatctcaaatcactagtcttattttacttgttttaaacagcttagtcaatcatcttctttattttgtaaggcagataaacttcattgagacaaagcattgccaaaagtaaaataattgtcttttgccatgaaaagctaaaacaaaattcaacagctgttagaaaatatagaataacacgcaataactgtttcaaattagccttcttctccgcttttgaaatgggaaaaagggctgttaaatattgataatcataatgtttataaagagccaacaattgaaaaagcaagaggtaattaaaaaggagcgctaaacctgctgacattaaaggattatcaataaaaagaagacttaaaagacttaaaaaacctaaacgaaaggtcagtcctaaataatcgccactgcgtaaaaaagctcttaaataaagattagtccacgctttatgagtctccttcggcaataattttgtcccaaaatccaaataagcccgtcgcttaacgctgtttgaaattcccttaacattggtaaaaagtgaaaagaattttaaaattgcctgctgccgctttttctcttgattaagagcatgatcccagttcagtcctttctgcttcaaaaaagctctgctttttttttcaatgattaatccctttaaaaagagcaaaaaaaggagcaaaaaaagaaaagaaaaaagtgccagtcccaaacgtaaaaaaagaggtgccaaaataagaagcaagagtgtctgccaagttccccaaaagaaaagagctcgtcttttagccttttggattaaagcaacaatgtccttttccctgaccaaaagaaattgctgatccgctggttccaaataagtcgctatatttccccaaaatagtaaggtcaagacaactaacactaaaacaagcatgataggccaatgattagccggaaaatgttttaacagttggctatactgtaccataagaaaacctagtaaaaaaatcaatactaaaacaaaatgatcattaaaaacatagcgaaggtatcgactgcattgattgataaaatggaatcgtctttttgtaaaaattgccttcataatcaaccctctttagtcaaagtcatatagatatcgttaaggctggcttgtgcatttccaaaagtcattcgtaaatcagcgagacttccttgagctcggatttgtccatgatgtaaaataacaaagcgatcacacatcttttcagcagaatccaaaacatgagttgacatcaaaatggattttcccttagccttttctgctgccaaaagctgagtcaaatctgaaatggcaacaggatccaatcccaagaaaggctcatcaacaataaaaagactcggatcaatgataaaggcacagataatcatgaccttttgtttcattcctttggaaaaatgaataggataccaatccagtttatcttctaatctaaaaagttccagcagtttttgcgcacgcgccaaagctgcttccactttaatatcataagccatggctatcatctccaagtgctcttttaaggttaattcttcgtaaaggctaggcgtttctggaataaacccaattttctttcgataagccatttcttgatctgcaagcgtcagtccatcaatactgattttgccttcataaggctgcaaaagtccaataatttcattgatagttgttgattttcctgcaccattgaggcctatgagcccgaccaactcaccatcagcaacctcaaaactgatatttttcaagacaggaatattgacgtaaccaccggtcaaattttctatttttaacatgacgtttctttctaactttgatatactatattataacaaaaacaagctaagtaggtgattttttatgaacgattgtcttttttgtaaaattgtagctggtgacattccctcatcaaaagtttatgaggacgaggatgtcctagcctttcttgatatttctcaagctaccaaggggcacactcttgttattcccaaggagcatgttagaaatgcccttgagatgactcaaacacaagcggccaatctctttgcacgcattccaaaaatcgcacgcgccttgcaaaaggcaaccaaggctgatggcctcaatatcattaataataacgaagaaaccgccggtcaaaccgtctttcatgcccatgtgcatttggttcctcgctttgctgattctgatgaatttgacattcgttttgtccaacacgaacctgactttacccgtcttggacaattagccgaagatattcaaaaggagattgaagcatgaaaattaaaactttcattctttcaagccttcttggagccggtctttatcagatgtattacaaacgcaaagatatcaagacttctttcaaggaaagcaaaacacattatgacaaagctaaattcgatcttaataacattaaagaaaatttagcgataatagagcagcaaaaagaaaagatacaagctatcaatcaagatttaacttataaaatccgtgtctttcaaaaagaaagccaatctcacatggacgaaattcaaaaaatagttgctaaatatcaccaagaagactagactgaatatcaccaagaagattagactgaaaaagagagcctcagagaaacttggaaagatatcattattatataaaaattggggttaaagtaagattctaatctcatttttttgcaacgtttaatctcgactttatgaagtaaggtgaaagggtataactgaaaaaccatacccttccaccttatttttaattaccaattcccgttcctgcagcaggttgttggtaatttccttgattataactattttgtccagaataatcactggaagaaccagaactcgaattggagccataagaagaactagaaccataatctgaacttgagccagaataattaccgctgctactgtaatctgaggcactggagctactgtcataaatactcgtatcgcctccataaaaattctcataaagactagccgttgttttcagattttcagcagttgattttttcagccctaattgtcctttaatacgattttgagcttttagcaattccttgctggttactagctgataagaaccaccatcaatagtcgttccttctcccttgagctgataagtcctaatactcttgagagcatcgctgtaccccaaaagtttaggaatagtactgctggaaatttcaatattagtctgcatattcttgctgacagctgataaaattttacgatacttgctgacactgtctaaagctaaaattttctttaagaccttgctgatgacctcacgttgacgcttttgacggccatagtctccatctggatcatcataacgcattcgcgaataaacgagggcctgctccccattaatcttgtgagtcccgggctcaactgatgctgtgaattcaggctcatgttcttcaattgaaattggaaaatcaaaatgattggttaccgtaataccacctacagcatcaaccaactgaaccagcccttccatattaatttgaacatatttatcaatcttaatgtcaagcatatcctgaaccgtcataatagccatcttagcacctccagcagcataggctgcattaagcttggcatcataaccagtctggtcattagttttagatccagataatttaaccaagatatcccgttctaaactggtcatggttgtctttttagttttgggattaacagttaccaaaatcatagagtcactgttaccttcccatttggaagtcctctcggaagagcccgtgtcaactcccattaagaggatactaaaaggtttttcatcagcaataacgtctttacctgaacctgtgccataatctttaaaagtttttgaaaattctcctaaagaaaagttataaatactcgttgcataaactcctaaagctaccaagtttgtgagaaatattgtaaccagcataattagaatttttttaccaatcttcatttgtttttctaatctatcagtttcctcctaaggtaaacatcaagaaatactccatcttttgtttttgagccgttcattccaaacagcgtatcatttcgctatgtgctaaaatcatcacaagttctatcacttggccgactagcttacaatcacacaaatttcattgactgattgagcttttttcaataaaagcagccatttcttgagcagttatatgagggctctcttcatctcaaattaaaattaatctcttaatcggttttttcgagatttctgataaactttttttctgtatcttcaaaactgacttgacagataaaaacttcctgctcagtcatgctcaagttccgcaaccaattgctgagagcgcaggccatgaggtaataaagtaatttgtctgccatcctctgttttatctaaaaggactgtcaaataatcgctcaaaaggctatcgtctaagagctctccccactcaatcactgttacgccatctccaaaaagaaaatcatccagatcaatagaatcaggatcatcaccaattcgatagacatccaaatgataaagtggcagccttccctcatattcacgaacaatcgtataggttggactcttaatcatctgcttaatccccaaacctttggcaattccttttgtcagagtggttttcccagatcctaaatcgcctgtcagaacaagaacgtcttgagcttgtagtttttgaccaattctctgtccaagagccattagctgattttcattttggctataaaacataaaagtattatatcaaaatcttttattacttccaactattttcaaaaaatgaaaaaatttcgctttggacagtaaaaataggagctcagccttatctgagctcctatatatgcaaataaaatttttaattacaaaacagctaaactgataaagttcaagatgaaaagaacatcaagcacccaaataataggatgaatatccttggcttcctttttaatcaatttagagaaggtataaaagagaaaaccagttgcaattccttgtgtaatactgtaagcaagccccataaaaacagttgcaaaaaaggctggaatggcttggctcatgtcagaccactcaatgtctttgagacttgatagcatcataataccgacaattaaaagtactgctgctgttgcctgcgttggaacaatagcaagaagaggactgaaaaaacttgatacagcaaaaagaagcgcaacgacaaccgctgtcagacccgtacggcctccggcaccaataccagcggcagattcaacaaaagtcgtcacatttgaggtacccgcaactgctccaaccgttgttcccaccatgtctgaaaacagagccttatccattttattttgcagaccagatgatgttgattcactagttacatcaaaaataccagctttagctcctgtaccaatgagagtaccaacattatcaaaaatatcagtcaaggcaaaagccaagatagtcatcaaaacctcaggaatgcgaccagcatctgaaaacagagctcccaaacctttattgccaagagccgctccaaaaattgtgcccaaatccttaacagcagccactggattattggcagaaaaatcaatttttgacagatcaacaacacccgctaaaagagcaataacagttgttacaataatagaaaggataaccccgcctttgatatttttaatgataaagaaagctgtgataataataccaataacggccacgagaactgccggattgttaaaattaaccagtgatggtgttgcagaagagttagctgtaatagaggctaggccttttgctgcacctttaccagagacgctataagttcctggatcaatagcaaaattcaacaaaccagcattcttaagaccaatgtaagtcaaaaagataccaataccagcactgatagcttttttaagactgtctggaatttcatcaataatcatacgacgaactctggttaaggtaataataattgaaataatcccacagataaaaaccatggctaaagcttcttgccaagtataaccaagtgaaaaaaccactgtataggtaaagaaagcattgaggcccattcccggtgccatagcataaggaatattagcataaagtcccatcatcaaggttcccgcgatagagccaataatagttgctagaaaaacaccttgtgacggcatacctgtctgactcaaaatataagggttaacaaataaaatgtaggacatggcaaagaaggttgtgatgccagccaacacttctgtccgaacagttgttttgttctcttttagtttaaaaaacttttccattaaaaatagttctcctttttatgaacgctaagtcttattatagctaaagatgaaatggtattcaagagcctatttgctgctttccttatcaagaaaaagcaaaaccatgatttgaataaagctaaatcccacaataaaaggcagaacatctgctgataagagtttacttaattcagtaatgactactgttggacgcaagacaagatcccaagaattaagtctggcatagcgtcctagatggatggcaaaactagaaatcacagacagcaatattagaacaaacagcttaaaataatattctttaatcacaaaacgtttcaataactgattgacactctcaacaccgcacaaggaaccaaaaagaatactagccaaaaacaaaaaatagtgaatcagactctgaacattactaaaactactgccaataaaatccatgtgcaccaaatccgtcaacatataaaaagtattgggatagaagaaaagccaaaataacgtaaaaataaaggttaatgaaagatttttaaaacgattaagacaaaaactaaaatccaaagccaaaagggccagaaacatattccaaattaaatacgtttcttttatttgaaaataaacaatagctccagaaatcataaagaaaaaaagatggctgataagcaatttatttttcataaaacacctccacttgtaaaataaaattatatcatattctcaaaaatgatatcttctatctagagttcactattaagaagttcttagaacctcaattttactattctatcctagcaagccttttaaattttttactgaaataaaatttgataatcaccgctctatcattgattttccttatatagtagtaaaaacagtttggtttaagtaagagcatcctcaactaatcattgaaatatttcgctcaaaaagcacactaatcatcccttcacttgcttaattttcttcttttctgctataattttgctatgattaaaaaaatgattgccattgatttagatggtacgcttctcaaaagtgacggaacactttccgattacactgtcgctattattaaaaaaattcaagagcaaggacacttggttatcattacgactggccggccctaccgtatggctttggaattttataaaattctaggattaaaaacaccaatgattaatttcaatggttctttgattcacattcctgagaaaaaatgggctggtgaacacaaggttcggattgaccgaaggtatctttttgacgttttaaagaatgaaaaggcctttgaagcagactttattgccagtgaataccgcaaaaaattttacttgacacttgatcaccgtcacgccattaaaccagagatctttggtgttaaagaattgacaaataagatgcagcttaaacctgaaaagattacacgggatccccatgcccttcttatgcagacccgagttgctgataaatatgctctagctaatgatatgcgtcgccatttcaatcatgaaatggaaatcagcagctggggcggccctatgaatatccttgaattttcacccaaaggagttcacaaagcttatgcactaaaaaatctgctcaaaacgctcaatctttctcgagatgatttaatagcctttggtgatgaacataacgatcggcaaatgttatcctttgcttctgtcggctatgccatgaaaaatgccagtgaagtactgttaccttatgctgataaaatgacacaatttgacaatgatcacgatggcgtggctaaagaactaaaaaaattgtttttatagagtaaaaaaggtttgtcaaaatattttgacaaacctttttttgaccattatgcaaaggatttttgatagacctttttcctaaaagagagtaagatgaagataaacgaggtaacctatgaacattggagaaaaactcaaaacagcacgccaacaatcccatctaactcaagaagctgtcgctgacttaatcttagtttccagacaaaccatctctaattgggaaaatgaaaaatcttacccagacattgtcaatttgataaaacttagtgacctttatcagattagtttagacacactgttaaaagacgatggaaaaatgatcgaacatctagataagacaactaatgctgttaaaagcaatcaaaaactgcaaacttttttattaagctatctggcgatgataacctgtctgctgcttttgtcattattctttctaaaaagttactatttcttattgtttttaagtattatcatgattttaggtgtacttattttgttttatcaaatcataaaaagaatttagaaggtgattgcaatgatgatacaacaaataatgttaataatcagtctttttctctttttgataggtgctattttaaccagctatcaaatttttaaaattgttgaacttgatgcacgagctagaggactaaataatcccgaactttggggactttctactgctggcagaggaaatattatcggtcttattctctattttaaacatcgggaagattatcctatcaaaaactttccacccaaaaagcaggcagagagttcaaaacgtaagagatgggctatccttaccctttttctagcaggacttggtgctgttggtatcgttttagctactttttagctcaattaagtcttaaaatcgtctgctgttaaggaaagctcctctctggcactatcttccagagcagttactgttacacctaaaagacggacaccagaattattttctgtcagatgatcaaaaatgcgatgagctgaacgctcaataacttcaaaatcctgagtgggtacatctaaggtttttcgcttggtcagtgttgaaaaatccgaataacgaactttaataacgacaatctttcctttgcgcccatgcttttttaaactgtcagctactcgtctggcagtctttgatagttccagtttaatatcttcatcattataaagcaatttcccataggtcctctcactgccaatagatttacgaatgcggtcgtttttgacaggagaattactgataccacgtgcttttcgatacagatcaaagccaaaacgcccaaaaagatcaatcaaggtcatttccggcacctgttgcaaatccttacccgtaaagatatgaagagcatgcagtttctcaacagattttttccccacaccataaaacttttcaataggtaaggttgctaagaagccttctgcatcctgtggcaaaatgactgttaaaccatgcggcttatcataatcgctagccaacttagctaaaaatttattgtaggagacaccagcagaacaagttaaatgaaattcttcccaaatatcgcgttggataagtttagcaatcttcactgctgattttatgttcaatttattttcagtaacatctaaataggcttcatcaatactcatgggttctaccaaatctgtataacgtctaaaaatttctctgacttgtaatccaatttgactgtatttagtatgattgcctctgataaaaatagcttgcggacaacgttcgtaagcttcttttgaactcatggctgagtgaataccaaattctctggccaaataattagctgtcgaaacaacaccacggccgcctgtttgacgggggtcagcaccaattacaagcggtttacctttcaatttaggattatcacgttcttctactgcagcaaaaaaggcatccatatcaatatgaataatttttcgtgacgtatcattaatcagcggaaaaataagcatcgcaacctcttttatgatttgttgtatccattatataatctttctgtactttccgccactttttgtatttataatacagttaagcttcttttaacaaactgtattataaaagaaatcgcttacaagcaagttctttcgcttgtgtaaccggttactgtatgatagaatataatcgtaaattgtaacagattaactgttactagaatagaggggaactcaattatggcaactgtcaaaactaacactgacgtttttgaaaaagcctgggaaggctttaaaggaactgactggaaagacagagcaagcatttctcgctttgttcaagacaactacactccatatgacggagacgaaagttttcttgccggccctactgaacgttcacttcacatcaaaaaagtcgtagaagaaactaaagcgcattacgaagaaacacgttttccaatggatacacgtattacatctattgctgatatcccagcaggttatattgacaaggaaaatgaattgatttttggtatccaaaacgatgaactttttaagctgaacttcatgccaaaaggcggtattcgcatggctgaaacagctttgaaagaacatggttatgaaccagaccctgccgttcatgaaatctataccaaatatgcaacaaccgttaatgatggtatctttcgtgcttacacttcaaacattcgccgtgcacgtcatgcccacactgtaactggtctcccagatgcatactctcgcggacgtattattggagtttatgcccgtcttgctctctatggtgctgactacttgatgcaagaaaaagtgaacgactggaactcaattgctgaaattgatgaagaatcaattcgtcttcgtgaagaaatcaatcttcaatatcaggcacttggtgaagtagtgcggttgggtgatctgtatggtcttgatgttcgcaaacctgctatgaatgttaaggaagctatccaatggattaatatcgcctttatggctgtctgccgcgttatcaatggtgctgcaacttctcttggacgtgtcccaatcgttcttgatatctttgcagaacgtgaccttgctcgtggcactttcactgaatcagaaatccaagaattcgttgatgacttcgttatgaaacttcgtacggttaaatttgcacgtactaaggcttatgacgaactttattcaggtgacccaacatttattacgacttctatggctggtatgggagctgatggacgtcaccgtgttactaagatggactaccgtttcttaaatacgcttgataatattggcaatgctccagaacctaacttaaccgttctttggtcaagtaaattgccttactctttccgtcattattgtatgtctatgagccacaagcattcttcaattcaatatgaaggtgtcacaactatggctaaagaaggttatggtgaaatgtcatgtatctcatgctgtgtatctccgcttgatcctgaaaacgaagatcgtcgccacaatctacaatactttggtgctcgtgttaacgttcttaaagcacttcttacaggtcttaatggcggttacgacgatgttcacaaagactacaaagtatttgatgtcgaacctatccgtgatgaagtccttgattttgaaacggttaaagctaattttgaaaaagcacttgattggttgactgatacttacgtggacgcaatgaatatcattcactatatgactgataaatataactatgaagccgttcaaatggccttcttaccaacacgtgttaaagccaatatgggatttggtatttgcggattctctaatacagttgattcattatcagctattaaatatgctactgtaaaacctattcgtgatgaagatggttacatttatgattatgaaactgttggtaacttccctcgttacggagaagatgatgaccgtgtagactcaatcgctgaatggttgcttgaagctttccatactcgtcttgcacgtcataaactgtacaaagattccgaagctactgtatcattgcttacaatcacttctaatgttgcttattctaaacaaactggtaattctccagttcacaagggtgtttacctcaatgaagatggttctgtgaacttgtctaaagtagaattcttctcaccaggtgctaacccatcaaataaagcttccggcggctggttgcaaaacttgaactcattgaagaaacttgactttgctcacgcaaatgatggtatctcattgacaactcaagtttcaccaaaagctcttggtaagacattcgatgaacaagttgctaacttagtaacaattcttgatggttactttgaaggcggcggtcaacacgttaacttgaacgttatggatcttaaagatgtttatgacaagatcatgaatggtgaagatgttatcgttcgtatctcaggttactgtgttaacactaaataccttactaaagaacaaaagactgaattgacacaacgtgttttccatgaagttctttcaatggatgatgcagctacagacttggttaacaacaaataagagttaaacagtttagtttaaaagacctcacttttatgagtgaggtctttactttgctttcgggtacaatcaaagcagtgagagctttttatattctaaaaactcacaaattcagaaaaaacagctcttgtgatttgaaaagcttttagctacaatataatattatgaaaattaattatactcgcgacacactgtcatccacctatcttgatgcagtaaaaattagaaacattgtcttcgttcaaggacaaggtgtcccattaactattgaagttgataagaacgaagcacattgcattcattttgtactttatgatgacaaaaatagggctgttgcaacctgtcgtcttttacccacgcaggatggaatcacagcgaccttacagcgcatggctgttttaccgggcaatcgcggtaaaaattatggaaaactcattctaggtgctgcaacagacttcgccaaaaagcagggttatcagcaaatgactttacatactcaattgagtgccaaaggtttctaccaaagaatgcagtttaaatctttaggacaagaatttgaggaagctggcattaagcatattactatgacaaaagctttgtcataaacatgtttatatgatgactgtattcgtacaatcatcttgattctctaaatatcagataggattgggacaaaggtgtcctgactcttttattgtctagtgggttcaactctcatttcatctatagcttagaaaatcagtcacaattgctatctaaaactttttttaaagcagccttaattacttcaattaaatcattgcgatctaaaatccactgggagcgctcatctttttcataagtacgattactaagaaaaatggctgcgctctgtttcttaatgttaagtaaaataaaggtaccagtatagcctgtatgaaacagccaatcaccagttaagtcccaagcaagactacgtgtcttgtcggcataagcaaaatcttgagtcaacggcttagcaaagtcatcgcttaaataatggttaacaaagcactttaaatcttctaaatttgaaaaaagtcctgctgagcctgtgtgaatgcccaaaacttgagcctttggatcatgaacccttccaatagggattgttttgcccgttggtactgctcttttaacaggtccaaaacttgtcttttccatcccaaaaggcttcaaaacatgttcttttatgatcctatctaaagactgatcatagaattcttccaacaaaaaacccaacaaaataaaattaagatctgtataatgaaaagatttagttttagtaacttcaatgtgattgattgcttgtttgagagctgcaaagtccaacttatttcggttgggaatgaagggatcaataccacttgtatgcgttaaaagctgcctgatggttactgaggagtcatgaaaattgggataataagcctggagaggctcatcaagctttaaatggttatcctgaagcaaaaagataataactgtcccaacaccgactaccttagaaacactagcaagatcatagaccagacctgcttttgtcttgtgatgaggaattgtttctcctaaataaaattcctgccattggccatcataaagtgctaaacttgctcctaaataaacgtgctgactaatctgttgattaatcttatcaataattttctgataggtcattttactttacgaaaccaaatttcaatctggcttggatctgaaaaaaccaaaatcttttccttcttatctaagtagacatcctgtcctttttcttcaagataattctttaaagcaacaagatcataattttcagcaactcgaatttctaaaatttccagatcccaggcaatatgaggctggatggttagatcctctccatgactctcaacaaaatctaacaaaattggaaattgattttgaaaaagatcttgataaaaattctgtgattttaccttatcgggaacatttaaacacatactttccactttgaaagctgacagccctttgaaatcaggtaaaggttgataatccgcttgtttagtctcttgaagagtcgttaaatcatcttcagcatgaataagaaagcgatccttttcaggagaaatggcctcaaaagcatagccattagctcctttaaaaaccttatctgcctgagctccattagctagtaaagcagcaatttcttcagtcttactagctttgataattattttattgagtttttttgtcccttttactgctcttgtacgaatatccggtgactcttcaatcaaaaagagactgcctgcttgagcccaatccccaaaaataaccaaagaattctcttccgaaagcactttgaaacctaaagtattctgatagaaatcaatattttcttcacgattattaatccgtaaaacgggtgagtaaaactccatctgttcaaacactgtcatcttgtccaatcctcccttagtagttctattttagacaaaatatgaaaatttgacaagaaattgtatgctttctttaatatttttttaacacaagattaaaaataaccgaaagacgaaagtaaaaaacaaaaagctgagcaaacaactcagctttttgttaatctaaatgattacttcatatataaatatttgaacaaggcaacgcctgctattccagcaaggattggtgcaatgactggaacccaagaataccaccactttgagttacccttagatttaccaagtactgattctggcaagaaatggtgaagaagacgtggacctaagtcacgtgcaggattaagggcaggtccagtaggacctcctaaagatgctaccagtgccataacaaggaaacctaaaccaaggtgagctatcgccaaaccagaattaacattggcacccactgtcagaccaacttgagagaatttaaaagtagaagatgttacatcagttcccatggtgtttaattgctgaacaatttcaccgccaaagtagtttttcgtaagagcaagtgcaccaaagaaaagcacaaatgaaccagcaaactcatttaaaaaaccattgataagtgaagctttcttacttgcatccgtaccatcatccacagctgagatagtagagaatgttcccaaaataccatcagaactttcagtttgcctgtaataaggagcatgagttgccacaataattaactgaccaaagatagctcccagcatttgtgcaagaatataaggaagtacttgtttccaagggaaaagatccgatattgcaaggccaagcgtaaaagcaggattaatatggttaccagatacattaccaaacatcaaagcaggcagcatcacaccaaaaccataacctaaggtgataataacccagccacttttgtaaccttttgttcctttcaattctacatttgcaacggcaccattccccaaaataacgagtagagcagtaccaataaattctgtgatatatttcacagtccacgtaacatccatttgtctgttattcctccgcattttaattttttagacatgtatcattttatcaagtataatagataatgtaaagactcttagaaaattaaaacgtttactttatgaaaggtccctatgaaatataatcaatacagttatatcggtacttcagtctcacaggctgaaaaagagctaaaagaacttggttttcaaatcagcagtcaaaaaaccaataaagcaaacttagcgacctttgttagtcaagtttactttcacaatcctgataaagatgatgtcttcaaaagtataattgctgatagtcagactgatttagcaacttttttgcattctgaccgagaattaacagaagggattttctatactttagccttgcaactcttggaatttacgccttatattgactttgacgaagcaaaaactttcattaaacacagtcattttcctatcatctttcaaccaaagcacttcttattgaatttttatcaattgctggggacgcgtactaaaaatggaatgactttgattgataagttggtcagtcaaggctttttgccagccgataaccattatcgttattttaatggtaagagtctagcaacctttgatacgaatgctctcatccgtgaaattgtttatgtcgaagctccccttgataccgataaagatggacaactggatctcattaaggtcaatattattcgcccccaaacaaaggcaaaactaccagtcgtcatgacagccagtccctatcaccaaggaacaaatgataaaggagccgataaaaaattgcatcaaatgaaaggtgaattgactgttaaaaaagctgctactatcactgtcactgatacccattttcaggctctgcaagctccctcttccaatttgccaattagtcctgcacaagaaagtttttcttacattgacagctataccctcaatgattactttctagctcgcggttttgctaacatttatgtatcaggtgttggcaccaaagattccgatggctttatgacgagcggtgattatgctcaaatcgaatcctttaaggcggttattgattggttaaatggcagaaccactgcctatacgagtcataagcgtgataaaagggttatggctgactggactaatggtttggtagccacaacaggaaaatcctatttaggaaccatgtcaacaggattagcaacgactggtattaaagaacttaaagtcattattgcggaatctgctatttcttcttggtatgattattatcgtgaaaatggtctagtgtgcagtcccggtggctatccaggagaagatttagatgttctgacggaattgacctattctcgaaatttagcagctggcgattatctaagaaataatgcgcaatatcaaaaaatgctagcagaacaagttaaacaaattgatcgcaccagtggcgattacaatcaattttggcaggaccgcaattatcttcctcatgcccataagatcaaagcacatgttgtctatactcatggtctgcaagactggaatgtcaagccaaatcaagtctactacatttttaatgctctgccagaggagatccaaaagcatatttttcttcatcaagggcaacatgtctatatgcataactggcaatccattgattttcgtgaaagcatgaatgcccttttaagtgaagaactattagatctacagaatcattttcaattaccaactattatttggcaggataattcacaagtacaaacttggaaaaaacttaacaatttcggttctcgtcaggcacgtcaattttctcttggacaagagaaaaaaatcattgataatcactatccttcttctgattttaagcgttacagtgatgactatcatgcttttaaacacgatctttttctcaagaaagctaacgaaattgccattgacttacccatccaagaagatatgctagttaatggacagatcaaactcaatctgacacttaaatccagtagtaataaaggactgctctctgcccaagttcttgattatggtcaaaaaaagcgtttctctgatttaccaacaatccttgaacacaatagcattgacaacggacaaaatttctcccgtgaagctttacgagaactaccttttaaaaaagcaccttatcgcatcatcacaaaaggtgtccttaatttacaaaatcgcacagatctcttaacgattgaagatatcttccccaacaaatggatgaccattacttttaatctccaagcaagtctttatcagctacaaaaaggagacagtctcagaatcgtcctctatactacagactttgaacaaaccgttcgtgataacagcaactatattctggtagttgatttagcaaaatcaactatcgaaatccccattgcttaaggccaacgcatgtaaaaagagcaaaaaatttttgctcttagaaagaaagcttgatcttcatcctaagatctgtcttaatatagcattaaaaacctctaacactatcaatgtaaaacgtcttcctctagctaattaaaaatgatataataaaaaacaggctgacaactcagttcttacttttcaataagacgattttaatccacaaacaaatttaaacaaggctcaaacccttgtcacgaaaggaaccttaaaaatcttatgatgaatatgcaaaatatgatgaaacaagcgcaaaaattgcaaaagcaaatggaaaaaaagcagtctgaattggctagcatgacttttgttggtaaatctgcacaagatcttgttgtcgcaacctttacaggtaataagaaattagtttctattgactttaaagaagctgttgttgatcccgatgatagggaaactctgcaagatatgactgttcaggctattaatgatgcacttggtcaaattgaagatgctacgcaaaagacaatgggggcatttgcaggtaaattaccattctaatccttacaacaaaaaacatgctaattgtcccgtggtactagttaagaagaaaagacccaattggactacacaacaatcatcaaaaatctctcatctgctctatcagaactattgcccagttccgataaaataccgttataacgtcagatgtctaaggtttcagacgaatctttattggtcttactgttattacaaactgaatttttgagattaactagtaccacgagtaaactacattttttatatcagtcaatattttaccctactaccgagtttgcttagcggaggccgttccttcactttctttatcttgataatctcgtccccactggtacatggctataatgattggcttcatagactgtcccaattctgttagttcatactctactttaggtggtataaccggatagaccgttcgcttgatcagaccgctagcttctaattctctgagctgcagggttaagctcctatgagaaattcttgggttcatcctctgcagttcattaaatcgttttttcccatctatcaagcggtagataagcagtcccttccattttccaccaatcagactcaaggtttttgcaacaggacacatccgttccttattgacatctgtctgcatattcttcccttctttcagtataaaaaatatagctaggtaactttttatatagtatataacaaaaatttgcgttcttcaagaaattctttcatcgtgctataataaaagaaagaaatattacttggaggaaaatatatgactattcaagcagaagaactcttacaagcttttcatttccgctatgcctgcaaacatttcaatcctaataaaaaaatctctgataaggattttcaaactatcttagagaccggccgactctcacctagttctttcggttttgagccttggcagtttctagtcattcaggataaagaactgaagaatgacttagctcccatagcttggggtgctaagaacagcctaaagggtgccagtcactttgtcatccttctagcgcgtaaaaaaccagacaccatttacagctcgaactatatctcccatatcatgacggatattcaacacttatccgatgaacaagctactggtaaacgccaatcatttgaacattttcaaaaaagtgattttaaacttttagacagtgaccagaccatttttgactgggcttccaagcagacttatatcgccttggccaatatgctgactgtcgcagcctgcttagagattgactcctgcccaattgagggatttgaccaagaaaaggttgagacacttctagcgaacaagggaatcatcaatcctcaagaatttggcgtatctgtcatggctggctttggctaccgtgatgaggaagccacccctaaaactcggcaaagtaaagaagatgtggtccgatacatttaaaagcagcgctcagctgcttttttacttctttttaaaaacatgctaatggttatttccttataactgcttaaaaagcctctacatacagaagtcccttattttccaccaaataaacgtgcaaaaaagccttttttaatgccttcttgctggctttgaatttcttcaacttctgctttggcttcatcaagttccagcttcaattgttctttgtcttgcatagccgtcaatgttaattgctgttgttgatcaatttgcttatctttttcagcaatttgaacatctttgatacgcagctgttcgtcctttgattctagctgactgtcttttgctttgagctgatcataaagacgagtgatttctgtattcttctcatcaatcaaaatttctagaaattcacgttgttttgcttcttcactgacaggttcatcttcaaaaatagttttcttataaatttcttctaatttgatcagaccagcacgattaacaacagtaacacctttatcattcttttcaacatactcttcaggaaaagatttgacacgattattaaccgcttgtcggctcactcctaaaatctcagccaattcgctgactgtcttttcaattgccataatatcctcatttttacagaattaatactatgaagatagtatcatatcgcccttaatctgtcaatttatgataggaaaacaacctgttgtttcttttcctattaaaggagcatcatttatgctagaataaaatcatgacacattttgatacaatcgttatcggcggcgggcctgcgggtatgatggcctgcatttctgctgggttttatggtaagaaggcccttcttctagaaaagaacaaacggcttggtaaaaagctggctggtactggtggaggacgctgtaatgttaccaataacggcactttagaggatttactagccggtattcccggcaatggacgttttctccatagtgttttttctcaatttgataaccatgatattatgtctttttttgaagataatggcgtcgccttaaaggttgaagatcacggcagagtctttcccaaaacaaacaaatcatgcactattattgattgtctggaaagaaaaatcaaagaacttggtggtttaatcaagacacagtgcgaaattgtttccgtcaaaaaagaggatggacagtttattgttaaatcagctgatgaatctttcacctgccagcagttgattattacaactggcggaaaatcttatccttccaccggttcaactggctttggttatgctattgctaaacatttcaaattgaaagtgacccatcttgaagccgctgagagtcctctactgactgattttcctcacaaagcgctacaggggatttcacttgatgatgtgacattgacatgtggtaaacatcagatcaatcatgatctgctttttacgcattttggtctatctggtcctgcagcactgcgcttatccacttttattcagggaggagaaacagcctatttagatttattaccacagcttactaaagaagcattgctgaaaaaaattgaaacaactcgggaaaaatcgttgaaaaatgccttgaagacattcttgcctgaacgtctagcagcatttctatcagaaggttatgaccacaaggtcaaacagctttccaaaaaagatttggaaaaaattctccataaaatcaaagctttaccgattccaattactggtaaaatgtctctagctaagtcttttgtgaccaagggtggtattgacttaaaggaaatcaatcctaaaaccttggaaagcaaaactatttctggtctacattttgctggtgaagtgcttgatattaacgcccatactggcggcttcaatatcacagcagccctttgtactggctgggttgctggcagtttacactactaataattataatattactttaatctttacctgtaattcccatcgtgctataatgatttatgatataaaaacacgttgcagttggtagtctgcaagcatcatgatgatgtcagtaaccttccctccaggtcgtcctttatcaaattttcttttggaggggactatcatgaaattgacagtctattttgatggcacattttggtttgctttggttgaacatgtcaaccgtaaaggacaatataaaatctttcgttatccatttggcaaagagcctaaggattctgatatttggaactttattgctaaaaagctgcccagtttgattaagaaatacgatcatatcaaaactagttctcatgctgatagtataccgcagcctaagaagatgaatcccaagcgtatgcaaagggttcttaataaatccaaaaaacagtctgcggtttctactaaggctcaggcagagatgcaaaagcttcatgaggctttaaaaaaagagaaaaaatctcaaagtaaagaaaaacggcaagctctaaagcagtacaaatatcaactgaagcaggaaaaacgccatcaaaaaaggcaaggacactaaatgttcttgctttttttgatttttttattctcacagaaaagatagtaaaaacatttaccttccttggtaggaataagaaccaaagtgctctatcttcaaaaaacaaatcttagaaaagccattataagaactcctgccaccactgctaagaggatattctttgtcttggcagccacccagaaagtcggcaacaccgccaacaattccaaccatttgatacttggtaaatgccctgttctttcaatgacaacgctagataatgttaaagcaaagataatcgtaattggcagataattgagaaaacgaataataaaattcggcaaggctttatatttagttaaaataaagggagcaatccgtggaatccatgttactaaggcactaagtcctatggcaagtaaaataaaattatctgacatcaagaagcacccccgcaaaacaacctattaatgttgaaagtaaaacagccaaagattcagatatcacaataactaataaaaaataagataaggttacagccaataaaataagtcctatctttttaagctttacgaactgcatcatagcggctaattgagattcaaagatagaaacaaacatggcaataagcgcaaaatctaaaccaagcgtctcaggattaggaataacagaacccaaggcagttcccaaaataactgcaaataaccaagcaatataccccgtaatattattgccatgcatccaagctgtactaatatttttatgatgaacatgttcattcaagagaacaccataactttcatctgtaatgagtgttccgatacagatagtttgccaaagactggatttagtaaagatcgttgtcgcatgcaaactcatcaagaaatttcgaagattaattaaaaaaacagtcatgacaattgaaaataaatctgcaccagctacaaacatggcgcacataacaaattgagcgctgccagcatagactaacagactcattaagcccatctgaaaaggcgttaaacctgaatttgctcctacaactccacaggcaagtccaatactaacataacctaaggctgttggcagagatgccttaactccttctttgaagcctttttcttgcatacaattctccacaaaagataatacctttattataacatagaaaaatatacttgaacatggggttcagagtattgacttttattctaatccttcaaaagccaaactgggtttagcatttagatcgagttctgcaaaatggcccttttcatattcaacggccgcagcataagcaatcattccagcattatcaccacaaagacgtagtggtggaatgacaacattaatatcttttatgtcttcttttaggcgttcacgaagaccttggttagctgccacacctccagcaataaccaaagtttttacaggataagctgccaaagccttttttgttttcaccatcaagatatccaaaacagctgcttggaaagaagcgcataaatcttctaagcggagttgctctcctttttgtcgggcattatgatgaagattaataaaagctgatttaagacctgaaaaggaaaattccaaattgtcttctttaatcatagcgcgcggaaaatcatagatatcttgcccttgatgagctagttgatcaatttctttgcctgcaggataagtaaggcccatgacgcgcccgactttgtcataagcctcaccaacagcatcgtctcgagtctccccaacaatacgataatcaccgggagccgctacatagacaagttctgtatgtccccctgacaccaagagcgctaaaagcggatactgcaaatcggcaatgctttgtgctgccattaaatgacctgccatatgattaactggaattaagggcaaatgattagcccaagcaaaagctttagctgctgccattcctaccaaaagggctccaacaagacccggaccataagttaccgcaacagcagataaatcacctgcagtaattccagcttcctgcaaagcatcctgaatacaaagcgtaatgacttcaacatggtgacgactggcaacttctggtaccacaccaccaaaacgcttatgactttctacctgactggcaataatattgcttaaaagttgatcttcattttttaaaatggccacactggtttcatcacaggatgattcgatggctaaaatgtatctatctatcatatgtctttcttatcttaataatctattaaaccttcacgtttcatcaaaatggcatcttctttaggattatgataataatcctttcttgtagtaagagatcgaaagccaaatttttgataaagagcttgtgctgcttgattggaagctcgtacttctagaaagatgggcagttcatcctttgttaacatcgccaagagttgactacctagcccctgtccttgataggccttcttaatagctatatttgtcaattctaactcccctactaaatgctgaatagataaaaagcccacaatttccttatcatcataagcaaaaaaataatccacatctagacgattcatatcagttaaaatctgtttttgactccaaggagagacctgataaacatcctctaggatggcaaaaaggatagcagctatttcttggtttttctcatctttcatcattacacccgtttgacataagaaagaccagaatcttcatgcgttttgagccaattctcttctgcttccacttttttaaggtatttgggaacaaaggcatgaacatcaactggagtaagcttttgtccgacctgaccgattttaaaagcggatggcagaacttccaagacttttgcctcaggaaaggtctgattaatttcttggcgaaatgctgtcacttctcctacaaaggtgacttgctttcttccttttaattgttccaaaacagcattcaaagaagcatattgatcagccttcgctgctctgccattttcataaaaaccaacataaacatgattccgcctggcatccatgataggtacaatgaacccttcatgatgactattaagcgccagcgccgctaagctagacacgccaaccaaatcaatagtaagcgtataagccaaggtcttcgctgtcgctacagccacgcgtagacctgtgtaggatcccggtccttcagcaaccacaatcctatccagatcttgaggacttaaattaactgacttcatcaaaaaatcaatggttggcatcagactaatgctatgattttttttgatagtgagacttgcgtcagctaataaccgatcatcctctaaaatagcaacagagagtgctgtgctagaggtatcaaatgctaaaagtttcatgaatttcctttcattctttatcccagagagaacgacgtttgagcttctcctcgtaaaaactacctttcgtatactcccttaaagcttgactaaaacgttcaatttctgggtagtctttctctaatttttgatcaaaattattttcgcatgcttcaacttgcggcagcagttttaggcctgctgccgttaaagaaagcaggaagctgcgcccgtcactggtcgatctttctttagcaactaaacctttcttaataagtgactgtaccaatctgctaggacttttctcttcacagatgagtagatttcctaattcttttaaagataatggagcacagcttcctaatataacaaggacttctccttgattaggagttattcccaaaggttctaataatttacttaattctttcatagccagtttttcagcacttttaaataaatacctaaattgagaccctttcaatgacattgtgcactttccttttaaaaatataattcgtttctttattattttacactagattcaccaaattgttgacaatttaagttaaaaaatataaaataatcaaaaatagatgacatgtcatctatttttgattaaacttttattaattaactcgccactaagaaaggacaattgaaatgaattctccttacacaagaagtccaagaactatcaaacatgcttttgtaactggtgccaccggtcttttaggtaacaatcttgttcgcgctttacttaaacaaggtattaaagtcactgctctcgtacgttccatggaaaaagctaggttacaatttggtgatttgcctatccagtatgttaaaggagacatccttaatcccgaagcttttcggtctgcttttaccgattgcgacactctttttcatacagctgctttttttcgcgatagtcacaaaggcggaaaacattggcaagaactctacgatactaatgttacaggaaccactcatttattgaaagcagcctacgaagaaggtattcgtcaaatgattcatacgtcttctattgctgtacttaaaggggaacgtcatcagctaattgatgagacgatgtcacgagatcctagtaccaaattagactattatcgtagtaaaatcctaagcgaaaatgctgtgagcaattttcttaaggagtatccagatttatttctttgctatgttttaccaggttctatgtatggtccgggagatatgggaccaactgctacgggacaactaatcttggattacatgcagcaaaaactacccgggatcatcaccaaagctagctatagtgtcgttgataccagagatgttgctgatattcatattttagctctaaaatacgggcgcagaaatgaacgctatttggcagcaggccgtcatatgactatggaaagtattgtcaaaaccttggaagaaataacaggcattcctgctccaaaacgtcatattcccatttttctagttcaggcattagcccaatggaatgaactttatcataagattactggcaaacctgttctggtcagcaaagaaattgcagacattacagctgaagaatatcttcggacatattttagccataaaaaaactgagcaggaacttggcggacaattcagaccttttgaggaaaccttgttagatactgtccgctggtatcgcaatcacggctatctgaactagtaatcaaaaggagcttttttataaaaaacttaagatctttagggcactcagatcttcttctatctcctatcggactgggaacttggcaatttagcaaccagggcagaaactggtggaaacctgttagcagttatttggtttatgatatcattaaagcctctttgcaaggcagaattaactggcttgataccgctgagtattatggacatggaaattcagaaaaatttatcggcagtatcctaaagctgctggaaaaagaaggcagtctgacagaaactatctatattgctgataaatggtttccgcttttgcgatctgccaaaacaattgcacagactttcagcggcagactgagtaacctgcaaagaccttttattgatctttaccaaattcatcaccctacttccatttcctctctcaaaaaacaagcagaagaattagcaaacttgcaagaaaaaggccttataaaagccattggggtcagcaacttttcggcccatcaaatggtaaaaatggatgagctcctcaaatcgtttggtttaagactggattctaaccaagtaaaatataaccttttgcaccgcaaaccagagcgaaacggtgttttagatgttgctaaagagcgagggatctctcttattgcatacagtcccttacagcaaggtgtactgacaggccgctttcatgcagaatcagacagcatcaaaaagatctccatgttacggcgattaaattccgaattaagcagccgcagtcttaaaaaaactcaacccttgattgagcttctgcaaaaactggctgataaatatcataagacacctgcacagatttctcttaactggttaatccatgcacatgttagcaccgtttttgccattcctggcgccagcagtctcaaacaagctcaaagcaatcttgaagcacaaaattttaaactgactaaaacagatctgcaaaaattaagcgttgacagtgaaaagctgaattagcactatttcttgttctaagactaataataaatcaggaaaacagcaatctgatcctcccaaatgatatttaaaataccaatacatctaaaatcttaacacctttaattttaaatgaaacttttgtagaacgataaaagaaaatcactaggaaaagcgttatttaacattcctacactatccaaggcggatttacccactacagatattatgaactgcaccatagctgataactaaacttaaagacagacatagcaacaagtggaaaatctaaaccgaaacatttcagaatccagaataacagaaaaccattcttgatactgtacagacataggagataatgatataatcagcatattgagaggaactgagccatcatgacaataaaagaagatttaggacggcggattaaagcagaaaggaatcgcaagcaactcacacaaagccttttgtgcggagatgaaacaaaactgaccattcgacagcttcagcggattgagggcgggcagtctttgccgaccctagaaaaattagaattcattgctgatcgcttaggaactaaaatagccgacctgctggaaggcagcgatatccagctgccagatgattactgggagctaaaggggcagattgttaaatttcccacctatgctgataaggaaagacttcagcaaaaacaggagctgatcgaagaaatctatgacaaatactttgatatcctgcctgaggatgaactgctctttttagatttgtcagagaatatcctagacagttttcatgaaaaagacattcctaacattgaggagatttacgacgatgcctttgagcaagtcctcaaaaaggagacctttgcctttaatgactatctttacatgagctattttttacaaaagtgcggaaaaacagcggactatgatcagacaactttcaagttgcttgagcaaaaattgctcaagcaagagctaacagtagacgaactttataatattgaacttttgattgctgttatggaggcatcaggtgtttatgcccttcataatgattaccagaatcttcttcctttaatgaagaaggctcagcgaattattgataaggctcagcttcacacctataaaccgccacttttagaacttgaagccaagtactatgtcaaggttgtcaaggataagaaaaaagctaaggaactctatcagcaagccttggtgatgggcgaagttctaggtgatcctgttataattgcagatgttaagatggagatggcaaatgatgggatagactagcaagagaggttattaagtttagcataacaaagaactttagcgtctatactttcaaagtaaaaggggaagtcactagtacaaaaaggatgattctctttagaaaaatattctttttccaagaggtgacactaatgtcgttgttgctttgaggaatctggggtagaatagactcatcaaatgaaaggaagtctttatcaaatgaacttgaaaaaagtattggaaattttaactacccttgttatgttagtaatggccgtgcgctaataatgaacatctattagacactacttctcttcagttagacaatctctagtaaattattaattatagcaactagctctgtaatatctatagtaggtatatttacctgctaagggtattacagggcttttcttttttgatttattagattagtacagaacactttttactgtaacttattaaaataaacaaaaagacaaacctccaaaaagaaatttgtctccatcttaaagaattatatctgtctatgtcagaacagcagcaagtcccgctcctgctgcaacaactgctgctcctgctataaccccattattaaagtcattaagattaattccattcagctcttcaactgtgacctcttcaaacatcaactctttttccatctttttcctccttctttttaatttcttgatttgttttaaaatttgcaactgcgactcctgctgtaaaaacagtaagaatcgacaaggtactaactaacaaaatttgaaaattcgttaatatctcatgattctttaaaaaacttgaacctaaatatgctaatattaatgttatgaaaacttccaaatagagtagctttcttgaaagtaatattttcacaggaactcctctctatattaagtgatagcaacagcaacagctaaacttcctcctgcacctactgctactcctaaagcataagacccccaaccatttaattcttctgaagtaacttcctcaaattttaaaacagacagctttgtctcatttttattttgtcctttcattctatcacctcccttcaaaattatattagaaatttgattaagctataaaataactggctgtaacaatgcttgccaaattaactttccaaagttagtgtttaattcgtcaacttcaatttcttgataaagattcacattagacatttgcttcttttcttccatttcatcaccccctttcaaagtttttatctctaaaaactgagcttaaaaagaattttgactttcaatttttttagaaatcaatttgagagctttttctaaaacatttagattaatattaatcggtggcataatagacagtccctcttcttcttcattaacgtaaagataagtaagtatcccaagtttttctaacgacttcattagctgtaacgattggttgctttctgtcctaatcgctgtcataattccctgattacggtagaacacattttgtgaatctaagacatttgaaatactatcagaaatatctttgactttgccttttataacgtctctagacttaagatagtaatccagaacaatattagccgactctaatcctaaaagattcccattttgagttgagaaatgctccatcgttttgggatttttctgtaattttgcatcaacttcttcattaacacagacgcagccaaaagacgtaatgccgttattaatagctttactgaggcataaaatatccggtttttcagataactgttggaaataaaacggcttccctgttttaaaaaatccagtagctacctcatcaaagacaatcaaaacttgattttttctcagtagttttaaaagtgcattgaaaaaatctgtactggcaaagtagatacctgccgaagccaaaatcggttcaatcatcatgacatcatagaaggaagctacattggcaatataatctaggacatttttttcttgttctgcagatttggggtagtctataaacgttacttctccatatttcggatagaaagaactattgatttcttgatcaataccactcactgaaacaccgccaaagaaggttccatgataagaatctttaaaggctagaatacgattattttcccccttcttattggtataatcagcgatttttaaagctaattctgtattttctgaaccagaattcgtataaagaactcgcttaaaagcatgccctgttagctctaaaactttttgggccacttcatcgtaaatatcatgttgaaaagaatgaatatcaagataagggagttttttatttaatacttgatcaaatcgcttggaaacccgttggtagagagaatcaatataaccaagtgaagtattccataaaccacttcttaaatcaagatacttcctattttgactatcatataaataagtgttatctgccctgacgggcttgaaatcatacatggttttattatcataagcaccgtttagcaaagcataatttttcatttttctcctcaccttctaaataaaatggccaagtaaactatgaataaaactaataatggaaagaatgatcataagaaaatttacgatacctaacaaaaagatatctaatctgaactttttattctttgaaaacatatccttgaaataagccatgtagtcctctaccttaagcaagttgctaagataccaataaccatctaattttaaaaacggcaataaattggtaacaataagtcctagattgacaatgattaatccaaataggaaattagatggatatatcaaagctattaaggttaagaaaaaccaaatagcaacttgaaattttacaccagctaaaaccaactcattcttctttcttccttttaagattttataaaaaggaaccttgataaagaagacaggcatagaaaaatatctcaaagagaatccaaaagtaactttagatggtttcaaatacttataataaactgagaagtgagcatactcatgcaatgggagaattaccacagtagtcacaaaataaatagctaccatatcccaagctgaaaagtgtcccagtgaaaaatgagtcaaatcaacagaggttgctgttgctacaataggtagcaagataaaactgcttattaacatcaaaagtgttaaataccatctatttaaaaataaagaaattttatagaaagcattaatcttagaactatctaaaattagtctaatcaggtgaaagttggtccattttcctctcctataaggagaggtataaaaatcgtgcagagggttatcaggttcttcaatagcttccaaatacttttccaaatgatggttggacgtaatcatacgatcgtttcggacattatatagccatcttctattatcgttaatttggtactgaatatccttatattcttctattgtttgatacattatctacctcctaaatgatagtataaccataatctaaaatgagattttgtccacgcatagctctgctgttcttacttagaaggaaaaatagtgtctgactaacatcttcaacagtcacaaacttcctataaggaatctttgctaataagcgtttcccaaagctcgaaaataacagttccttattactatcattaatgatatatgaaggcgagattgtattgaccctgatatccttatcctctattttagcgtaatcaactgatagattttttgccaattggattaaggcacttttggcaggcccataatctattctttgttcgtgagcaacaacaccattttgcgaagctataaaaacgatagaagctttgtcagacagatagctataaattgccttcatagaaaagagagctgcctttacattaatatcaaatgtgttttcccagtccttaagtgttactccaaatgcatcattcatataattaataccagaagtaaacacaacgctggaaaagtttaggtctaattcttttaaaaaggtttccatcttgtggaaagaatcatcttgtcgaaaatcaacagaaaggtacgttgttaaactgctagattttttaggaaaatcaattccaacgatttgatcaaaatcctcggaataatttttcaaaaagccctgacaaatatggctttctgaaccaattaaaagcaaattattcttccccatgaaaaactccttctaccatggcataattatctaaatctttgataattttcaatctaagacctgattctttaaacagtttttctaatatttcataggaataagaatatttaacagaaaaacctattttctgaggacttaccaaattgtagataatccgttcttcagattgatcaaaaaagttaacattgtaaaatttttcaccatctatttggctagattgtataaggccagccgttgattcaaaaaagctttcttttaagaagtcaaatacaattctcttgatatggggctgagtttctttaatctttttcaaaaaatcatagaaatctccatgactgaaaagcgaaactgaagttgctggaataataatgacctcgatgtttttctgcggaagattcccaatttcttgtagggtaagagaataaatcctatctcggccttcattggtaatatactttgccatttcttttgcaggctctaaaccaaaaatattatagccatcttcaaataaagggttaaaaattctacctgtcccactaccaatttctaaaatgggcattgacttatcaaaaaattgtttatagctgtcaatatcatcctctaacaattcatcttgattaacaattgatcggtagtagttcgcaaagatatcatcctcataaagattctcaatgatttctagctcttctgctcttttttgaagcttactaaaaattaatgatttatccatatacttgcagcttctccttcacttgactcattaatttcttattgtcaatgttaccggtcttatctttaatgatgtattctaaatattgggtaactaaatcattcactttaaataaacgcccagttttaacattaaaagcaaaatgtgcactatcatttttaaaggcaatccattctaactggttaagcggtaaatcgactgcttcaatttgatagttgttatatggggtaataaaatctacttccccgtaaatatatgtaatatctaacaaggctgtcaacaaatattttacattctcttttattaataaattatcaatttccgataattgcaaactagcttgattatggagtttctggtagctgtctcctgaattcccaagtctcattttcgcttgagaatctaaataaaactgcccctccatgaagtataaggaatttaatttagcaattcccgctaatacaccataatccgcaatataatttgtcaaactgattcgtccagaatcgacaaactgcctaaaaagttttctcaaagactcctgattcaaaatcttaaagtttagcttttcaaaatctgccacagatttaataataataggccactcttctttaacaactttgttatttgtatagacagcactgttgattgcaaaatgatttagtaaattatgattttctgaaataaatttccccaaatcatcaacaaaagcgtgtttcaataaccctttaggcaaatttgtataagtagcagttttaaaggctttaaagccattttgaaagatttgctctgtcttaagagagcttagtttgtgatataaatcatgattttccaattcagttttaatttcctgtattttagaattttcaagtaagttatcaagatcttcaatatcaattacttcaattttcatatcaagttgggcttttaaatagctaacaagttgttttaatctattattttcttcaagcttaataaagacatattgatcaaattctaagaattctaagtaatcaataaaatcttcaaaactttgattatcaaaatcaaaataatccaagctatagttttgatcaatttgagttgataattttagtgagtatagcaacccatctttttcaaagacaaaatttaatccaatcatattctcctccattttaaccttcttgtaataaggaagactaatttatttatgagtaactagcttttcttttgttgtctagctactgtaacaattaggatcaaaagaaccaaaagccagataaataaactcaatatttgtaaggtggcatggtgccaagaaaatttttcccatttggtaaaaaacttcgtaaaaaggcccataaagctatagtctgtcactttggcaacggttttatccataccagataacattggtaagaaagctgaaataagcatcgttggaaccgcaacaacctgggccataacttgtgatttgacaagtaagcctaacaataagtagagaagtgcgattactaaagctgtagcgctaccgacaagacaataatttactaaatgatcaatcggcacatccaaaataagcggagtaagcgtcagatagactactgttaagacaattgggacaactaatgttgataagaggtactcactagtattaacaccgctaagcagcagagtttttagtgttttcttttctttttcatctgccaaaatagttaaaattggattgcctacagctaggacaatggcaaaaggaatacagatcatcagataggcaagagccatttgggcttttggaccagactgactgtctatcataaaacgataaagataaatcaaagctgcaggcataagtacttgcaagagaatgctcttattagaaagaataatctgacatcgcaaccaaagaagagccataaattgtctaaacattgagtttacctcctgttaattgaataaaaatatcttctaatgtcggttcgcaagaatgaattgcaattattttttcactatcactagccatcgcttgacctagttcagtaaaatctaaaattctttccgaaccatcttgataactcaacttaacccgtttgttttgattatacttctgaattaaatcttttggactgccctgttcaactagccggccttcattaagcaaagccaatttatcacaaagcagggtagcctcattcatatcatgggtagttagaaaaatggcagtccctgccgcttttagttctaaaattaaagaatgaatagtctgagaagtagccggatcaagacctgaggtcggctcatcaagaaatagaacgcgaggcttattaattaatgcacgagctagaagcatccgctgcttcatacctgtcgagagcttttcggctactgtttttcgactgtcatagagaccgacccgcttgaggagattgtcaacagtcgttttatctatcccataatatttactataaaaaagcaggttattataaagagatattttttcataaaaaccgctggtatcaccgactaaaccgattttccctaattcttgactcgttaatttgcgggagtcttgtcctaaaatagaggattgaccgttgtctgccattaactgtccggttaaaatattgattgtcgtggtttttcctgaacctgaaggtccaagaaatccaaagatttgacccttttcaatcgaaaaactaatagcatcaagtgcaacagccttgttaaaaatttttctgatatctttggcaacaataactggagtattcatacgttttcctttcttaacggtatagcattattataaaagataaaaaaacaaaaagaaagtgacatcaatgtcagacgacattaatgtcactatagaaaatttatagatagtctctcaattctctgataaatcttttcattaaagaaacaacaaaacttgttaaagtctgaagcatcaaaaaggtgctgtaaaaatggagctaaattaaagtctaatagaggatatcgtcatttttagttgataatataggtttcacattactaacaaagatagaacccagtataataattttcctttaatacttttactaactccttaaattatggtataatttgagtaattgtaacaatcaagattaaatctattactcgtaaaaatttcataaatttttgtcaaatgtagttatatttgactgattttttgtagtttggattaatcatgatatgacagaaaggaacactatgatttacaaagttttctatcaagaaactaaagacagcagcccacgccgcgaacaaaccaaaactttatacctcgatattgatgctcaaaccgaactggacggacgtattcaagctcgtcaattagttgaagaaaaaatagcttataatattgaattaatagaacttctttcagataaacacttggagtatgaaaaagaaacaggtgcctttcaattaacggagttctaaaatggcaaatattaatttaaaacctgaagaagttggcgtttatgctattggaggtctaggtgagattggtaaaaatacttacggtattgaataccaagatgaaatcatcattgttgatgcagggatcaaattccctgaagacgatctgctcggtattgactatgttattcctgactattcttatattgttgacaatgtggatcgtataaaagctctcgtcattacacatggacacgaagatcacattggtgggattccatttctcttaaagcaagccaatatccctatttatgcaggacctctggctctagctctcatccgcggtaaattggaagaacacggtctcttgcgtgatgctaagatgtatgaaattaatcataatactgagttaacctttaaaaatcttagcgtcacttttttccgaacaactcactcaattccagagcctctaggaattgtcattcatactcctcaaggtaaagttgtctgtacaggtgactttaaatttgattggacacctgttggtgagccagcagatatccaccgcatggccgcactgggtgaagatggcgttctttgtctcttatctgattcaaccaatgccgaaatcccaacttttaccaattctgaaaaagtggttggccagtccattatgaatatcatcgaaggtattcatggacgtattatatttgcatcctttgcttcaaatatttttcgtttacaacaggctgcagaagctgctgtcaaaacaggccgtaaaattgccgtctttggacgttcgatggaaaaagctattgtcaacggtattgaactgggttatataaaagtacccaaggggacttttatagagccaaatgaaatcaaagaatatcatgctagtgaaatcatgataatgtgtacaggcagtcagggagagtctatggcagctctttcacgaattgccaatggaacacacagacaagttcaattgcagcccggtgataccgtcattttctcatctagcccaattcctggtaatacaactagtgttaataagctgatcaataccattcaagaagctggtgtagaagtcatccatggtaaggtcaataatattcacacatcaggacacggcggacaacaagaacaaaaattgatgctgcgccttataaaacctaaattcttcatgcctgttcatggggaataccgcatgcaaaaggttcatgccggcttagctattgataccggtatccctaaagacaatattttcatcatggaaaatggtgatgtcctagctctaaccaaagattctgctagacgtgccggtcatttcaatgcgcaagatatttatgttgacggtaatggtattggtgatattggtacagcggttctgcgcgaccgacatgatctttccgaagatggtgttgtcttagcagtagcaactgttgattttaaaaccaaaatgattttagctggcccagatattctcagccgcggtttcatttatatgcgtgaatctggtgatctcatccgcagcagtcaacgcattcttttcaatgcgattcgtatcgctctaaaaaataaagaagccagcattcaatcggtcaatggcgctattgtcaatgcactacgcccatttttatatgaaaaaacagaacgtgaacctattatcattcctatgatattgacaccagataagtcttaaatcataattgtaagcagctattattaaagagcttgtctaagcctaagcaaaaacgctattctttgccccatccttagccagtgtctacagacattggctttttattttgtctaaaacaaaaaagacaagcctcaaaaagcttgtcgtcaatctgataaaagaaaatcttctctaatttttttattttagttaggataaatataactgacactgcctggtgttccactattatttggatcaaaccaaccacgatagttatcaacccattgttgatctttataattggattccagtacttgaactttaccatcttcaccaacagctgtgacataggcaacatgtccataaccaccatctgtccaacacataatagaccctactgccggagtgttaccgacagtgtaaccttgtgcagaagcactagaggcccaatcaccgccattgccccaccagtcgcctgcccaagttgcaacagctttaaccccccaagtacattgaccaacaggataagtattggcattcgcatcattcgtttcagtggttgcttgcgtagtgtcagttggcgctgccgcctgattatccggtgctgccgaaccattaacagttaaagtctgacccggcaaaatcagactggtaatatcttttccattcatagaagctaactcataagcatccatatgatatcgttgagcaacactgaaaaaagaatctccttcttgaagagtataagtgtctgcatcagccattttatttcctaaaacaactgttgctgccgtagccgcaacagtaaacacagctttttccaaaaattgttttttcataacgattattcttaacttctccttttagtaatagtaacatcataccgaattattatttcaacttttttaagaaaaagaagtttttctattactaattgataacaaagaaaagcctgagacgaaagtcctgtctcttttgttctactctcactctgtaaccatcattctgaggttttgatcaattttctctgctgttttgcgtccttctcgaattccccaaataacaagactaggaccacggcgtgcatcacctgcaacaaaaaccttctcatttcgagttgaatagtcatcataaacacattcaactcggaattggtcaaagagcgctttttcagcacctgtgaagcccatagcaagaagaacaagatctgccttaattacctcttcagttccttcaatggctttgaaaccaggtccaaccttaattgtcttcaccgcagtcacttggccattttcaccaagaaattctactgttgacgtgatatagtccgtcaaatcagtctgttgaacaaaatcggcttcttcctgtccatagcctgtacgattaatcataggatattgtggccatggatttgttggcagacgcttttcaggcagttgcggcgtaatttctaattgtctaacactagcagctcccaaacgaacagccgtaccgatacagtcatttccagtatcgccaccgccaataactaagacatgttttccttcaagcaagggcggtaattcgtgtgtgtcactgtccaaaagatttttagtcgtttctgttaagaaatcaacagcaaatcgaatgccttttaagtcacggcctggaatatccaagtcacgaggaacgctagctccagttgccaagattacacggtcaaatttttctaataattcttctgctgtaatatcacgaccaatttctgtattggcaacaaaattaataccaattgaagccatcgtatcaatacggcgttgcacaattttcttatccaatttcatattgggaataccatacatgagcaaaccaccaaagcgatcagaacgctcaaacacagttacactgtgacccaactggttaagacgccaagcagctgacaggccagcaggacctgaacctacgacagctactttaaaacctgtacgctcaatagggcgaccagaatcagctacccagccttcttcaaatgcattatcaataataaaacgttcattatcatgaatagtaacacccgaaccatttaaaccttctgtacaggccttttcacaaggtgccgggcagacacgacctgtcatttctggtaaaggattagttcgtgtcaagcgttcaaaagcacgtctgaaatcgcccttataaatcaaatcattccattcagggattaaattgtcattgggacaacctgaaacagcacgaccgccaccatagaatgttccctcatgacagaaagggatcccacaattcatacagcgagcagcttgcttttgacgttcctcaactgataaagttgtctgcaattcttcaaaatctttgatacgctcattaacaggacgatagggattgtccttgcgctcatactttaaaaatccaaacggatctgccatctcatttccctcctgttacactagccaacaaagcttgacgctcttgcgctgtagcatcgccgccggttgctacttcaaatgtacgtaattcgagttcatcaccactcatgcctttttggctgagagcatattcaatatcattaatttcatggaaatcacttggataaactttgataaatcttttcacctcttcatcccaattatccaaaagacgtttggccttgacactttctgtatattcatagtgcttttcaatcatgtcttttaagatgtcatcaccacgagtttcaccaatctgataaagatctaccatctccatattgactttttgagcaaaatcaccatgaacatcgtaaacataggcaacaccaccactcataccagcagcaaagttgcgacctgtcgttccaagaatgacagctacaccgccagtcatatactcacaaccgtgagcaccgacaccttcaacaacgacttttgctcctgaattacgaacacagaaacgctcaccagcacgacctgcaaaataagcttcacctttgacagcaccaaagagagagacattaccaacaattggtgaattttcaacgtcgtaggctgcgtcgtgcggcggtttgacaattaagcgtccacctgacatagatttagcaatatagtcattagcctcaccaatcaaggtatactctaaaccttgtgtaaggtaactcgcaaaactttgccctgcaatgccagtataatgatatttaattaaaccttctttaacagcgtcattaccataacgttctgccatccaaccagccatgcgactccctactgaacggtccacattattgatggtattttcaatagtaacactaatgcctttttcaatagctgctgctgcaaaaccatccagttctttccattgacgttcttcagcaaaaggatcttcatttttccgatcaattgggaaactgttcccaataacccttgaaaaattaagagattttgccttaccttgtgcaacaaatctcgatttcaaaacttctgcatgaccaaccatttcatcaacagagcggaaacctaactcagccatgtattcacgtaattcttctgccaagaaagtcatcatgttaatcacatgttctggcttgcctgagaagtttttacgtaattctggattttgtgttgcgacaccgacaggacaagtattaagtgaacaaacacgcatcatgacacatccaactgaaatcaaagctagactagcaaatgaatattcttctgcacccaataaagtagcaatagcaatatcgcgacccgtcattaattttccatctgtttccaaagtcatacgttgacgaagacgattcatagacaaggtctgatgagcttcagccaagcccatttcccatggaagccccgcatcacgaacagaattacgaggagaggcacctgtaccaccatcataacctgaaataaccaccttatcagcacccgctttaacacagcccgtagcaatcgtaccaacacctgtacttgatactaatttaacattgattttggcataaggattgatagctttcaaatcataaattaattgtgctaggtcttcaatggaataaatatcatgatgaggtggtggtgaaatcaggcgcacacctggggttgctccgcgaatttcagcaatccaaggaaagaccttttgaccgggaagttgtccgccttcaccaggcttagctccttgtgctaatttgatttgcaattcttctgcagacatgaggtattctgcattaacaccaaaccgtccggaagcaacttgcttaattttagaattaatattgcgaccatcaacttgcggtttgaagcgtttgcgattttcaccgccttcaccagaatttgatttagctccaatagtattcatcgcttgagcaatggtttcatgcgcctctttagaaagagagccaaaactcatggcaccaaccttaaaacgcttaacaatttccttagcaggctcaacttctgctaaatcaacttttggtcgtttagaatgaaattcccaaagagaacgcagggtcgtcggttgttttaaggcctcattatctagttcagttgaatattgtttgaagagaccatagtcaccacgacgaatggattgttggaaattatagatagagcgtggattaaagaggtgatactctccatctgtcttatactgataggaaccaccagaaggcaagaaatcattggctctcggtccaaaagcgaaatcaacgcgttctaggtattctttttcaatttgcttcagactcaaaccttcaatacgtgtagctgttcctctaaagtattggttaacaacatcagcagaaagaccaatggcttcaaaaagctgagcacctttatatccgagtactgttgaaattcccatacgactcatgactttaacaatgcccttttcggcagccttacgatatttttcaaaagagtcattggtcttatcaaaagcttttagagttgcataagccccataaggatgaatagctgttgcaccaaaaccaaccaaggttgcaaaatgatgaacttcaaaagcttccgccgtatcaacaacaattgaaaattgacttgcttttcctttgacaaccatgtaattattcaaaccggaaactgccaacaaaataggaatggctatgcgacctttagtgactccacggtctgacaaaatgatgatcttactgccttgattaattgcttcatcagcttttttgaaaagatcttccaaagcatattgcaggcgattattgtcagaatctcctaagtcataaacagtggatagagttgttgtcttgtaacgttcatctgttaaattggctaattttgcaaaatcttgactagaaaggacaggactgtcaacccgaaccttgacacaattatcagcattatcttgacgaatatcgccatcaccgcctaaaaagactgtcgttgacaccactaattgctcacgaatagcatcaataggaggattggttacctgagcaaattgttgcttaaagtaagtaaagagagactgcggttttttcgataatactgctaatggactgtcaaagcccattgaaataacaggttcctctcctttttctgacatggggagaataactgttcgaatggtttcatctgtataaccaaaaattttccacatttggttcacatcataatcattgacaatttcctcttgagcagcaaagtcatccaaaagagtaacattttcttgcacccactgttgataagggtgttgtttagaataatgctctttaacctcatcattctttaataccaagctttttttggtatcaattaacatcatattgccgggaccaaggacccctttttcaacaacctgactaggtgctatatcaacgacacccgattcgctagagcaaattaaaaaattatctttggtgcgagaatagcggctaggacgaagaccattacgatccaaacgagccccaaccatctcaccatcagtgaaaacgagagcggctgggccatcccaaggagcgacaaaactggaagcatattcataaaaggctgttaattctttagaaagtcctgcatcttttccccaagcttcaggtaccatcatcaataagctttgcggaatatcacgaccatgacgatagagatattctagacagttttctaatttagcagagtctgaattttcttcattgtagacttcaatttgatgactatgcatccaattttcagcaccacgaagcgtgttgatttctccattatgtgctaagaagcggaaaggctgagcacgatcccaagatgggaaagtatttgttgaaaagcgagaatgtgttaaagcaatgtgtgatttgaacatttcatctgacaagtcaggataaaacagacgaacctgaaaagcatgcagcattcccttataaacaatcgtcttgcttgataaggaacaaataaaaagttcatctgcagcaaacgttttttccaacttgcggcgcagacggaaaagactatcttcaaaagcacgcccactatttgtttcagtaggtttttcaataaaaagctgcacaaaacttggcatgatttcctgagcagctggaccacagttgtcataattgaaaggaacatcacgcgacagcaatacatgaaagcctaatcttttgatttcactaatcaaactatcttctaaaattgtttttgctactttatcttgaggaagaaacaattgggcaacagcataatctcccaatggtggtaaatcaatctcttcttctttagccttcaatctaaagaactcatctgggatggccaacaacataccagcaccatctcctgtatcaggctctgcacctgtacctccacggtggttcattctctctaacatcgttaaggcataatccactaactgatgactggcaataccatcaatttgagcaacaaagcccatcccacaggaatctgtctcaaaagatggatcccacaaagtcgtctgcttagcttttttaataacctctctcatacacttctcctaaccaaatgtcattattgctaaattttcgaataaacgcctaaattatatcatatattaatgaagaaaaacagatttcctcaaaaaattctgaaaattcaattattagattgattaaaaaaacagccagctatcggctgttttctaaccttaataaagatccaaatagttgtcaacttcccattgcgatacaaaagcagcatagcttgaccattcaatacgttttgcctcaagaaaacttgtataaatatggttgcctaaggctgctttaaccacttcatcttcttgtaatgctttcagagcattatgaagagttgatggaagatctgcaatacctgcttctttgcgttcttcaacagtcataacataaatatttgattctacaggtgctggtgcttcaattttattttcaatgccatcaagaccagattctaaaagaacagccaaagctaaataaggattagctgtaggatcaaccgaacgcaactccagacgtgtactaacaccacgtgaagctggaacacgaatcaacggtgaacgattgcgtcccgcccaagcaatatagactggagcttcataaccaggaaccaaacgtttatatgaattaacagttggattcatgatagcagtatagctataagcatgttttaccaaaccacctaagaattgataagcaacttcagataactgcatccctttaggatcttgtggatcaaagaaagcgttcttaccatcactgccaaacagagacatattacagtgcatccctgagccattaataccaaatttaggtttggccataaaggttgcatacaaaccatgtttacgggcaatcgttttaacaactaatttgaaaagttggattttatcacaggcagttaaaacatctgcatatttaaaatcaatttcatgttgaccaatagccacttcatgatgacttgcttcaacttcaaatcccatttttgttaagacattgacaatctcacgacgggtattatcagcaaggtcagttggtgctaaatcaaagtaaccacctttatcatttacttctgttgtcggattaccaaattcatccattttgaaaaggaaaaactcaggttctggaccgaggttaaacgatttataacctagactttccatatgacgtagtgcttttttcaagttaccacgtgggtcaccggcaaatggttctccttctgctgtataaatatcacaaattaatccagcaacggctccgttttcatctccccaaggaaaaacagtccaagtattaaggtcaggataaagatacatgtctgattcattaatacgtacaaaaccttcaattgaagagccatcaaacatcgctttgtttgaaagtactttgtctaattgttcgtcagtagctgggatttcaacatttttcatggttcccaagatatccgtaaacattaaacgaaggaaagtaacattcttttctttaacttcacgacggatgtctgctgctgtgattgccataacggcctccttttaaaaattaaattccatgttacgtatttacatacgtaaaccaccaagatgttgcgttgggctcgaaaagcgaccctgatttcggagttcgtcatgtaagatacgtcgaacatccgcatctgtcaaagctttctgctttttcagagcacgatctttacgatcagcatactctctcttgatagccgcgatatttaatccttcatctaagaaatccttaatttccagtaaaacatccatatcattcagcgagtaaagacgtcgatttccagaactacgatctggcgtcaataaaccttggtcttcataataacgaatttgacgagccgttaaatccgtcaatttcattacagttccaataggaaaaaccgccattgatcgtcgaagctctttttctttcatgactttcctcctttcattgtctattatattctgaaaatttatagctgtcaagcctatatgtcatatttcctgacataaactctaaactttactttttgtaaaaaattttcgtactctatcaatatctgaattaacagaaatggcaataaaaacccctacaaaagtttcaaaaactctagcacaaacataaagaattgtttcatctttgggaatagaaagcgtaataataagcaaagctgcaacaccaccaataattcccgtcttattactcatggccacattagtcataatggttaacatggtaaatattggaacaaaaacaactgtaacccaatactgaaagtgaaatagattattgatgagaaaaaatagcagtgaataaactccgccaatactattaccaactatacgtgacgtcccaaaatggatgcttttatcaaaatcctcacgtaaactaaaaacagccgttaaagcaccaatttgaaggcctttccagccaagtataccaaaaagtaaaagcactaaaaaaacagctaaacccgacttaaaagtccgcatacccaatgtaaatttttggagaacaaaatgatattttttcatacttttattgtaacatgattagaaaaaaagaagctaattgaaaactaccttataataatgtctcagtcttatttaatttcattgaggctgatatcatacacataaaagatgcattatagcctttccccaaccttctcaataaagaggattattaccagtcaatgcagccaaacctgaaagtatccttcccttgcctccactgattttctgagctcaccttatttggcaaaaatactgtatgcactagaaaagagttgcgttcacaactcttttcatcacaatatcttcattctcacaaaaaggtggacaaatccacctctttgctatcattacgatttcgcacttttttacaaaatcaggattgagacttacaggcgtacatcttatttttccgtgagtgcagcgaggcctgggagtacctttccttcaagcaattccatgcttgcacctccacccgtactaatccatgagaatttatctgcgcggccaaggttgatggctgcagcagctgagtcaccaccaccgatgattgatttaacacctggttgtttgacgatagcatccatcacaccgattgtcccagcttggaaatcaggattttcaaagacacccataggaccattccaaacaactgtcttagcacctgttaattcatcatcaaatttagcaattgattttggaccgatatcaagaccaaggaaacctggatcaacagccgcaccttcagtatctttaacttcagtgtagtcagcaaaagcattagcttcttttgagtcaactggtaagattaatttcccatttgctttagccaaaagatctttagcaatgtcaagtttgtcttcttcaacaagtgaatcaccaatttcgataccttgtgccttgaggaaagtataagtcataccaccaccaataaggactttatcagcttttttaagaagattttcaataacaccaatcttatctgaaacttttgaaccaccaaggatagcgataaatgggcgaacaggattgtcaacagcttcttgaatgtaagcaatttcgttttcaagaagaaagccagcaactgctttgtccacattagctgaaataccaacattagaggcgtgagcacggtgagcagtaccaaatgcatcatttacaaaaatgccatcgccaagacttgcccaatatttaccaagctcaggatcatttttagattcttttttaccatcaacatcttcaaaacgagtgttttcaaccaaaagaacttcaccatttttaagagcattaatagctgcttctaattgttcaccacgtgttacacctggaaaaacaacttcttgcccaagctttttagccaaatcagcagctacaggagcaagagatttcccttttttatctgcttcctctttgacacgtccaaggtgagagaaaagaacagcacgaccaccatgttcaatgatgtatttaattgttggaagagctgcagtaatacggttatcatttgtaataacgccatcttttacagggacattaaagtcaacacgaacgagaactttcttccctttcaaatcaacatctttaacagtcaattttgccatgaatatagactccttaatttttttatacatgataattatatcacaaaatcaataaaagtaacaaagtaattttatttatatttaataagcgagcgacgatagctctttattaagtaaagtcattgttccaattactgcaaggagggggagaagattagttatttcttaaaaataaccttattcgggtaatcagattaaaatcgttttgctataaaatttactgcagctaggtaatgaatcaaaagagaatattccagatatttccttcatagaccaaaaaacgcaaaaataaatcatagttttatagcaataattttaaccaacacacagtatcgcttttttcaagttcttaacctttataagaaaaagaggaccaaaggtccccttttacaaaataatgagtattatttagcgatttttgcaaagtactcaagagtacgtacaagttgtgaagtatatgacatttcgttatcataccatgaaacaactttaaccaattgcttgccatcaacatcaagaacttttgtttgagttgcatcaaacaatgaaccaaaagacatacctacaatatctgatgatacgattggatcttcagtatatccgtaagattcatttgcagcagctttcatagcagcattcacttcatcaacagttacctttttatcaagtacagcaactaattcagtaactgaacctgttggaactggaacacgttgtgcagcaccgtcaagtttaccattcaattcaggaataacaagaccaatagctttagcagcaccagttgagttaggaacgatgtttgctgcagcagcacgtgcacgacgaaggtcgcctttacggtgtggtccatcaagaaccatttgatcaccagtgtatgcatggatagttgtcatcaaaccttctttgatactaaagttatcatgtaaagctttcgccattggtgcaagacagtttgtagtacatgaagcacctgaaataactgtttcagtaccatcaagaacatcgtggttggtgttaaagacgattgtcttaatatcattaccacctggtgcagtgataacaacctttttagctccaccattagcatgtaagtgtttttcagcagctgctttgcttgcaaagaagccagttgcttcaagaacgatttctacaccatcagcagcccagtcaatctgttctggatcacgttcagctgaaaccttaacgaatttaccattaacttcaaatccgccttctttaacttcgacattaccatcaaaacgaccttgagttgaatcatatttcaacaagtgtgcaagcatgtttggatctgtaaggtcattgatacgtgtaacttcaacaccttcgacgttttggatacgacggaaagcaagacgtccaatacgaccaaaaccgttaataccaactttaactaccattagtgatttcctccttatgaaaatcaaaaaaatttattttaaaaggcattgccttttagacgattgtgaaaagattaacttacacaaatataaaccaacctttcaacaaaattattatataattattttaagaaaattgcaaacgattttccctattctagcaagaaaaaagagagaataagaagtcaagatttattattttaaacttcttattttctcttaataatcactattgaaatgctataaaattattatttcttttataaaggattaattagtagcatgttcactaaagaaattaagcttctccagcgtttttcttaatgatttcttcttgaacagattttggaacatcttcatagtggtcaaataccatcatgaaggttccacgtccttgagatgctgaacgaagaacagttgcataaccgaacatttcagcaagcggaacaaaagcacgaacaatttgactattaccatgtgcttccatgccatcaacacgtccacgacgggcagtgacatgccccataacatcaccaaggttttcttcaggaacagtgatagtgactaacatcattggttcaagaataacaggtttcgcagttttagcagcttccttaagagcaagcgacgcagcaatcttgaaggctgtttcagatgagtcaacatcatggtaagaaccatcataaagtttggccttaacatcaacaattgggtaaccagcaagaacaccattagccatagattcaatcaaacctttttctacggccggaacaaattcacgtggaacaacaccacccacaatagcattttcaaactcgaaccctttaccttcttcatttggagtaaattcaatccaaacatcaccaaattgacctttaccaccggattggcgtttaaagaaaccacgtgcttgcgtagcttgacggaaagtttcacgatatgacacctgaggagcaccaacattagcttcaaccttgaattcgcgtttcatacggtcaacaaggacatccaagtgaagctcacccataccagaaataacggtttcacctgtttcaacatttgtttccacacggaaagttggatcttcctcagcaagtttttgaagagcaatccccattttatcttgatcggctttcgattttggctcaaccatcaactgaataacaggttctggaacttcaattgattcaagaatcacttttgctttttcatcagttaatgaatctccagttgttgtttctttcaaaccaactgcagccgcaatatcaccagcataaacggtttcaatttcttgacggctgttggcatgcatttgaaggatacgtccaatacgttcacgttttcctttagaggtattcaacacataagaaccactgtttaggataccagaataaacacggaagaaagtcaaacgtcccacgaatgggtcagtcataatcttaaaggcaagagcagcaaatggttcatcatcagatgctgggcgctcttcttcttcatcagtatctggattaacacctttaataggaggaatatcaagcggacttggaaggtaatcaacaaccgcatcaagcatcatttggacgcctttattcttgaaagctgaacccgcaagaactggaaagaattcaacattaatagtagctttacgaatagctgcttttaattctgtttcagtgatttcttcaccttcaagatatttcatcatcagatcttcatcagtttcagcaactgcctcaatcaatttttcacggtattctttagcttgatcaaggtaatcagcaggaatatcttcaatcaaaatatctgtaccgagatcatttgtatagatttcggctttcattgttaccaaatcaataataccttcaaaatcatcttctgctccgatcggcaattgaatagggtgtgcatttgcttgaagacgatcatgaagagtgctcactgaataaaggaaatcagcaccaattttatccatcttattggcaaatacgatacgaggaacaccatactcagttgcttgacgccaaacagtttctgtttgaggttcaacacctgactgagcatcaagaacagtaacagcaccatctaggacacgaagagaacgttgcacttcgatagtaaagtctacgtgccccggtgtgtcaataatattgacacgatggtctttccattgagcagtcgttgcagctgaagtgattgtgataccacgttcttgctcttgttccatccagtccatttgtgaagcaccttcgtgtgtttcaccaatcttatgaattttaccagtatagtaaagaatacgctctgttgtagttgttttaccagcatcaacgtgagccatgataccgatattacgagttttttcaagtgaaaattcacgagccatgaggtttatttctcctattttttattttattactttgttactaaaaacggataggcataacctacccgctttatgttttgtttcatgtcaattaaacaagaagatcaagctctcaaaaagcgcttgtctagtttccccttgttgacaagtgtcaaagcgggttgtatcctaccaacggaagtgtgcaaaagcacggttagcttcagccatacgatgtgtatcttcacgttttttaactgaggcacctgtattatttgacgcatctaagatttcttttgcaagacgatctttcattgtgtgttcaccacgagtacgtgatgcagtcaccaaccaacgaagacctaatgttgtacgacgttcaggacgaacttcaactgggacttgatagttagaaccaccaacacgacgtgcacgtacttcaagtacaggcatgatattttccatggcttgttcaaagacttcaagtgcatcattccctgttgcttccttaatttgttcaaaagctccataaacgatagatgcagctgtaccacgtttaccatcaagcataatacggttaataagacgtgttacaagttttgaattgtataatggatctggcaatacttcgcgcttaggcgcacggtttttacgactcatttcttaatctcccttccttatgcttttggtttcttagtaccatatttagaacggccttgtttacgatcagtaacaccggcagtatcaagtgcaccacgaacaatatggtaacgcacccctggaaggtcctttacacgtccaccacgaataagtacaacactgtgttcttgcagattgtgaccaatacctggaatataagcagtgacttcaataaggttactcaaacgaacacgagcaaatttacgaagagcagagttaggtttcttaggggtcattgttccaacacgtgttgcaacaccgcgtttttgaggtgcagcaagtttagtatgaacttttttatggctattatagccaatattcaatgctggtgagtcagatttttctactttagacttacgtggcttacgaaccaactggttaattgtaggcatctacattctcctgtatttttttatttttgggtgattaggcacttggtgacagtcctaatctgtgtgtactttgcaacatttgtcagcacgtctctgtacacttttgagagaccaaaagtaaaaagtaccatttatcataataacacagcagaatcgctttgtcaaacactttttccttgatttatatcttctagctatttttaaattgaccttatatgaactttctctatactatttcaatttcactatgtgctatatttcatttaccaaaaatatttcccaacttaacatctaccttgctttctttaacatcaatattggttactgttaaaagagatttatagctgatgccctcacgtttttcctgagcattatcggcaaagacggccactccaaccaactgactgtcaaattcgctcaaaaggctaaccataccactgatggttcccccacccttaagaaaatcatcaacaattaaaacgcaactgttgggatttaaactgcgttttgataaaaacatcttttcaatacgatcgcttgatccagaagcataattaacagatactgttgaaccttctgtaatcttcaaatctcgacgcacaatgacaaaagggacattaagaatattagcaacggcattagccaaaggaacacctttggttgccactgtcataacagtatcaattttttcatctttaaaagcattggcaataatacgaccgatattttttagaatacttggtgtcgatagtaagtcagacaaataaatatagccacccggcaagatacggttgctttctgccagtcgctgacaaagttcttgtgcaaccgttctcgcttcatcatctgaaatagtcggtgtaaaaataacaccaccattggcaccagttaccgtcttaatatggccaatatcagcgtgagcaaaagctttcttaataattgcaatatcttcagaaatcgaagactttgccgcttcatacttttgagcaaaagtattaaggctggttagttgataggggttgttaattaaataatttgaaataacaaccattcgttcgctacgtcgcaatttcataaaatcaccattcgtttttttacttttattatatcatattaaaaaataaaaagacgaacattagagctctaatagtcatcttttttcgtgttttgatggtttgttttaggtttatagaaagaacgattatccatagcaaagatacgaccagtcatctctccttctgatacacgagatagagcagtcgtcatcatcatcatttcagcatcaatattatcaatcatatgaatgatttctgcttccataattttaggtctaacaggactgccatattctaagagaccatgatgactgagaataacatggcgcaagacaataacatcttccttagtatcatcaatagccaattctgataaaactttagtaatttcttcatcaatcaaagcaatatgaccaataagattgccacgaatagtatattcggtattatcaggaccagatagctcaagaactttggctaaatcatgcagcatgatacccgcaaacagaagacttttgtcaagttcttcataaatatccccgatactatcagccaaacgaaccatagttgctgtatgataggccagaccaacttcaaaagcatggtgatttgttttagctgccggaaagctgaaaaattctttactatacttacgataaagggcacggacaatccgttgccaggtagcattttcgattttgaagagcatctgttcaagataatctttgacctcttcaacatcaacaggcggtttttctttaaaatctctaggatcattaggctctccatccttaggatgccgtaagctgatttgattgacctgtggtgtcccattataaacttcacggcgtcccctcataaagacaactttcccagcagtaaattcttcaacattataaggctgagcatcccaaagattaccagaaatttctccactatcatcttgaaaggtaaaggcaaggtaatcttttcctgctcttgtttttctgagttctgctgacttgatcagataaaacccttcaaaaggttcatcttttttcatttgattaattttcatttgatccctcatcttctagcggcgaaaggtctaaaaccgacttagtgttttcatcttcatataattcaatatttctaagtgctcgtccaatggcattggtgcgcgttattaaaagtttatcaatattgttgctagcttgattgagttgttttttggttgtctgtaaaagacctccaaacttagcaaattctgtcttgacatttcctaaaattttaccgatatcatcagcatttttttgaatattcaatgttttaaaaccaacagacaaagaatttaagagagctgataaagttgacggacccgctacaacaatatgttcatcacgccgcaaagcatcaaagaaacttgcatttctaacaacttccgaataaagcccttctgttggcaaaaacataatcccaaaattggttgtttctggtggattgagatatttcttttgaatatctttagcaaaagtcttgatactgcttagcagtttttttcgataaagatcaatttgctccttattaccaagctcataggcatcttccaaacgataataattttccagtggaaacttagaatcaataggtaggtaaacataggttccttgctgattccccggcaatttaatagcatattccacacgttcttttgagtccttcacagttgcaaattcacgttcatattgagattcggtcataatatcttcaataatttggcttaattgtaattcacccagaattccccgtgttttagtattggatagaaccttattcaaggtaccaacatcacgtgccatgttcttcatttcacccaaaccttgattaacattttccaactgcttagaaacagtttcgaaagatgttttcaggcgcgtatgtaaggtttggtctaatttttctgcaacggtttgccgcatctcttccaagcgtttttcattggaagtttgcatttctttgaccgactgatttaattgtaaattgatttgctctaaacgcttatccgatcgatcccgactgtcatttagattttgatgtaatacctctcttaagtcagttaattgttgagagagatcattttgtaaacgtgtcaactgctgattaattgcaagcaattgatttttattagcaacctccaactgataagaaacttgatcagaaaggttatccgcattgtcatctaactttttttcaagtcccgattgatttttatccagttttagaaaaatagcagagctgataaaacaagctgtcaaagccagtaagagagtaagaatatccatttattattaggtcctatcttttgtttgaatgacaacaacataacctgaagcgactgaaaaacaaatcggtttgtccttaaattcattgctgctgtaaattttcttttgaaagtagttctcttctgttaattcgtatttagcatcttgaatagacagatgagcgccgtttgctgccataaaggaaatataaaccatatcagttgcctgttcaatttgatgttgccctgctggaaaaaattccactaaattttgttcatcacgtaatttaaaacagcgcataaaaggagctaaatcaggatcgctaggtaaaaaaatattggacagcatatggtctatccgaccgccaaaagcaccaaaaacaattatttcaaccctgccaaaacagtcaaaaattgtttttaaagccaactctgtatctgtatcatttttttctgcaggagccatcaccagctttttagccttggctttaatctgcttaaattcctctgctgagacagaatcaaaatccccaatagctaagtctaacggtaactgatttttcaacagaaaagaacttcccttatcaatacctacaaaatagtcaaaatctctcgtgaaataagtaagatcgcctccagaaaacagagctaccttagtcatttaaagccgctttcaaagtttcaacttgagcagctagattttctttgaaaaggtaagaacctgctacaaagatattggcgccggcttgctttgctaacttaatggtttcattgtcaataccgccatcaacttcaatatcaaatgataaacccttttcttcacgaagcttagcaacagttcttactttttccaacatttctggaataaaagcctgaccgccaaaaccgggattaactgtcataataagtatctgatctgctaaagacaagacagattctaaatcagcaactggtgttccaggattgatgacaatacctgccttcataccagcatccttgattttttgaagggcaccgtgaatatgatgggtggcttctacgtgtactgtcataatatcagcaccagcttgagaaaaatcatcaacataacgctctggattaactaccataagatgacaatcaaagacgagcttactatgtttacgcatactagcaacaacaccggcaccaaaactaatgcttggaacaaactgtccatccataatatcaatatgaacgtacttcacaccagtttcttcaatgcgctttaattcactttcaaagttagcataatctgcagctaaaatagaaggggcaatttgattgagcaacataacagacctactttctttttaatacttttttataagtctctcggcgattttcaatttcactaagaatttgcaaataagtttgatagcgtttttcccatatttttctctgtgccagagccaatttcacagcacaccccggttcatgcgtatgagtgcaggaacgaaacttacaagcagcacttaacttcagaagttcaggaaaagcagcatttaattcctcactacttgttatttcgtaatccagcgaagaaaatccgggagtatccgcaattttcccgccataaatgttatacagagtaactgcgcgtgtcgtgtgacgacctcgtcctaaactatctgatatctcattagtttctagtgccaaatcaggggcaagtgtattgagcaaggtcgttttcccaacacctgtttgtcccataaaaacagttattttatcttttaaaagaggagttaaatcttctaaataataaacaaaataataaccaatcttttgatactgcttttgaacctttttaaattcatctaaatcctctagtaagtccgttttagaaagataaattatgggactaatcttcctatgttctaaaagaatgagaaaacggtctaacaaattatgattaaaatcaggttctttagcagagataatgactactgcctgatcaatattgacaattggcggtctcactagactgttttttcgttcatgaatagccagtatataaccctcagaattttctttagctgaaaaatctacttcatcaccaacataaggtttatgtccttttttcctaaaattaccacgcgctcgtgtctgataaatctgaccatctgactctacataataaaaaccagctagggactcaataatttttccttgcaaacgctctccttactaaacttaatagtttcattatatcaaaaaaacaatctttttgctggtagctattggcaaattttaaaaaaagcgtataatataattattacttgcggagatggtggaacggcagacacgcatgcttcaggcgcatgtgctcgtatgagcgtgagggttcaaatccctttctccgcatttttgaatgccttgacaatgttagtttaacttaatctacttcttcagtattatcttttatttcattgccttgtcaagttcattcaaaaaatattataaaattgtttgaccacaatgtgcctaacacaagttatgcctcattgtgctttctcgttatattttggaaaggtggctcagcttggtacagcaccggactcgaaatccggcaagtggacattgttcatgcgcgggttcaaatcccgtcctttccttaacattgaaagaagctaaaatattccagtaagatgatttaatcaaatggatttaaattatgattgattgttttagtttaaataataagaaaaatctcactgacttagcgagatttttttgataagacaagcaggcagcaacctagcaagaaggtcaaagctgtcatactgcctgtgccatacttttcaagcgggctgctgctgataaaaagattaaaaacggttgctaataaagacagccctgtcattgttaccatgacgagattcagctttgctttgggccagcggcttggaagaatttgcccatagatcaagtaaaaataagcaaaaaatgaccaaatcagggcgaaaaagagattggctggtcttagccaaagcggaaagaccgtgtaaagtcctccgaaaaagaaaccacccaaaggcaatcctaacaaaatcaagaaatgaaggaaagcttgtatgaagtaaagaacagcgcagaaagcagtgattagtttgggcttagtcataagaatccttcatttcaaatcaacttctcgtagagcatctgccaatctggcaaagtctgtaatcgtcagtgcttcaccacgaatagatggtttgatgtctgctgcttccaaggcttgttccagcttgactttgacctcttctgatttgccaaagtggctggtgagattgttccagagggttttacggcggtggacaaaggcagctttgccgacgcagaagaagaaatcttcatcctgcacttgcaccagcggttgttcacggcgggtcatcttaagaatggctgaatcaacattgggtgctggcacaaagacggtacgtggcacaatgaaagcaatcttagccgtcatgtaatactgcacagcgattgacaaagacccataagccttggtacttggctgagctgaaatgcggtctgccacctctttttgcatcataaccacaaactccgcaaaaggaattttactctcaatcaggtgcatgaggataggcgtcgtgatgtagtaaggtagattggctaccaccttgataggcaggtcaggattggcaaattccttgatacgtgtctgcaagtcggacttgagaatatcttcattgaccactttgatattgtcaaaatcgcgcagcgtatccgccaaaatcggaacgagacgatcatcaatctcaaaagccataacctcagcggcattctccgccaaaaattcggtcagagcaccaatgccaggaccaatctcaatgacattgacagttttgtcaatctcagccgtatccacaatcttctgcaagatattggtatcggtcaaaaaattctgaccaaatgatttcttaaacgtgaacccgtggcgctccaaaatcgcgcgagtaacggttttgtctgcgattttcatgttttctctttctatttcggtaagtgttgtaaaagttgatctttcaattcttctatctcagaagaacttgctttaaccgcatacatctcctcaaaaggcagccaccaaacaggacctttacccttgcaaccatgatttcctaaatcaccagtttttcttggaaaaaggtgccaatgcagatgactatcaccatttcccaaactttcgatattcattttttcagctgaaaatgctgcactgactgcctgtgatacgtctgctatttcagacaaatgcttatcacgaaagtctttgggcaagtcgtgaagctctgtcacatgcttcttacaaagaaaaatcgtataccctttgaaatgctgatgatcgccaacaacaacataaccagtttctaattctttaacaaaataaggattggttcttgatttaatcctatcaatccgctcacaaatgaggcacatgttgttcttctcctgagtatataaaatcacttaatttttcaccttccttattgtaacataaataaagcaaaggccgatagttcttagcctccacttaccttattcaataatctctgcaaattctgcaacagactttctcacatgcggattgcctgcctgcaatgcttttcccaccggcagcatcaaaataggttcccattcattcggcatgtcaagataggttttaatagcatcaaaatccacgccacgcataggcacactatcatagccgtaaaccctcacaacctgcatgagattcatagcaaagagcccaacatctaatcgtaaaccctgagtctccttatcctcagggtgcaggtcaaagtactgacgaatccgttcagctcgcgctgctgcttcatctttcgtgataatacctttttgcacatgaaattcctgccaccaagtcaaatcataggcattttcatccccaaataagagaaatactgctgacgcagttgcaacttgcggctgaagggctgccagttttttcagatcttcttgtttgtttttatttttcacaaccacaacgcgccaaggttgaaaattattaccagacggagcatagctggcatgctctaacatatccttgataagatcatttggcaggactgcatcaggatcaaattgtctgactgatacgcgtccatctaagaaattcaaataatcattcatcataagcctccttgttttttaagatagttttattataataggcttatcaaaagaaaaacagtaggcacttttttgtgacctaccaaatcaggagaaaataatgcaaacaaagccaaactggaattgcggtttaacccgtgttatggacgctctttcaagcaaatgggcactacagattttttgggttatctcgcaaaaaagccccatccgctttaatcagctaaagagagaagttgatggcattaccaaaatcatgctgacgcgatctttagacagtctcattcaaaacaagcttattttcaaagaagacttcaagacttggccgctccatactcagtattcactgacaaataagggcaaggaattattaaatttactgatgtctttgaatggttgggggagagaaaatttataacattttacgaataattaggttcaggaaagttccgaaggccaaacatcattggtatgcgtgagatgtcgaagctgtcatcaaaagattgctccgcagcaatctgcaccagttgggcgttgggcttgattttaatagtatcgtcaatgagctgattaaacttttcatccgacaaatccgtctcacagatgatgttaccactctgaatataagtttgaacagactgcaaacctgtaaactccaaaatctccctaagataagccatttggggaattctattttttccaatgggttaacaccacgtagaagggcccttattagctaatcttccttatagaaacagtctgatttgtaaaaataaacttcacagatacattctaacacgtttttggtattcttgataggcagcgccaaattttattaaacattctctttcctccgccagtatgataaagtaagctgatagttgaaaaatcgctaagaaaatgagcagtgttaacgactgagtcagcatcgccacgcctaaaaataaaacaaaataagcagtatacattgggtgacgggacagagcatagagccctttggtattcaatcctttttcatcagggttggcaaaatcctttatgaccaaaaaaagaagcacactgcctaagagataggcacccaaccctaaatagaaaaaactagagaaatgaagactgacttttaaaaagaaaggaacaatcagaagcataagggtagataattgataaagatagtaagctattatttcttttccctgcatcgaagcaaaatagactgcccgccccgttgctttcctatccaagagtgagagaaaaataaatctgataaacaggaaaggaactagtaggtaaaaagctgtcatattgatttcctcctcaattattctgctattccttttgaattaacaatcagatctgcacctgctgctgggaggtcaaccgtcaaggtgttgctttgttcccagtcaatcttacaataaacttcgtacatgccctctgatacatgaaattttaatttctaccctcacttaatttttccaacgtattcgccatcaatgaaaactttaaacttcctaaacatattagcaccttttgtgcctcgctctagtctgattgtagctattttgtcttccaatttctatcttttttgatacttttccatcacttcttcaacttccgccttagtaattccaaagagttccaagcgtttaagcagctgtttgccattgctgtagcctatacgcagcttttccccaagatactcacggcgcttgcggctatcagctcccatgagaaggccaaagcgtataaggtcggacttgctaatatcaaaatgattttcatcatcatacttacccaaaacaccagacaaagccttttgcaaatcttcaaaagaggcatgttcaacgcccagcgaacgacctttagttttggacttaggcactgcttcaccgcgattgagaaaagcatgtttagtggacggaacagctgtcataatcagcttgcgaatgcgttcgccattatagtctggatcagtaaatacgataactccgcgcagattattgagtttttcgatgcgctctaaatcttcatcattgatagctgatcctctggtttcgtatgtatctacatcataaaagcgacgtagattgacggtgtcgtctttgccttcgacgacgaggacttcttgtattttgattttttctgtcataaattctatttttttgacagcttgcctaaggtagcatggacgcaagcaaacctttggtttcattgctaaacttcaagcctaaggtcttgaagttttcatcgtcctctaacaaacagttgttagaagatttttgctacggcggcaactgtcttattgaacgaccttcggccgctagtgctctgctaagtgattttcaccacagtgcccttgttctttaagggctccctctctctagtctttcaatctgaatagtctcatagcattgtcgtaggtgccttgggcaacttcttcgattgtgagaccgcgaagctctgcgattttgtctacaacatagcgagtataggcagtatgatttttacggccacgtttgggtacaggagcgagatagggtgcgtcggtttcgaccaagattttatccaatggtaaatgctgcgcagcctcttggacatccaaagccttcttaaaggtgaccacgccagaaaatgaaatcatcatgcccaaatctatgaaacgctcagccatttccaaagagcctgagtaagaatgcatgatgccaccgcgcggaccaactcccgcctctttgataatctcataagtatcatctaaagcatcacgggtgtgaacaacaaagggcaggtcatggtctttggataactgaatctggcgcttgaaaacctcgatctgtacttctttaggatcttccatccagtggtaatctagcccaatttcgccgagagcgataactttagggtcatgcagatggctgacaatcatgtcctccacttcctgcatgtaggaaccagcttcagtcgggtgccagccgatagttgcatagagttctgggtagagctcagccaattcaagagcacgcttaatggttgattggtcaaaaccaacaatgttcatcttggttacgccgagttcatgcgcaaagtcaatttcttcttgttcttttccagtaaaatcttccacgttaaggtgggtgtgagtatcaaatatttgtagcatactatcattataacatatgctaaataaaatattatggtttactgagtgagataatggagctgattttagtacagcccccctttgaaaatgaaaaataatagctgtctgtcccctcttatgcattagccttacaccttttaacagagagacatataaaaagccaacaggctcgagttcctgctggttctgctttatttgtcaaactttgaaaacttattccaatgaaaatagatcatgagacgcaccatagcatttaggtaaataattctcctatcattaacacagaaaaaaagttctttccattaggctgacaagactttacgtcccttacgacgacgcgcagctaagacgcgacgaccatttttcgttgacatacggtgacgaaatccatgtttacgttgacgacggattttacttggttgaaaagtacgtttcactttgaatacctcctcatagattttcgtattcgtttagccggctattatgtgatcagttactaaacatactagatcattttataataaagaaacggcagtgtcaaggtttatttttccttggtatgtgtcataagtttttaataagacggaaaatccaatgattatttgccagaacagttttcttattgaataacatcaaacaaatctgtaaaattgaactattcaatatctaatcatcataacacaaagcaacaagatataaaggttacttgaatagaggaaaagacgttcaaaaaggccaaaatattttttaacaaagggtaagaataaagcaatgaccaaaccatacagtcctacttccacaactattttgatataagatgctatcaaaaataaagtggcattcaaaggtttaagaacttctgtaacattaaaaataaatattgccaaggccgtaaattgtaaaatagcaaaaagtaaatgaataatccctttgactgttcgtttgctaccttcaatatctgtcggaaatagcgctacccctgcataaccaatgatagccaagatgagcaataagacagcttcctttttaaaagaaaaagaatacttccagaaaatcagtgatagaattaaaaaaagatttctaaaggtattagctaaacctgccagttgaaaataagatttattctgtccgataccataatcactgactgcatgagtcatggggtgataaacgcctttattttttaggtgcaaaattaccatacaataaaagtacagaacaaggcataagatggctaaaatactaaaaatagtgagcaacataagaacttccttcaattaagtatagcaagcaactgtaatcaaaaaggattttttataaagaaagaatttgagagcagcctatcccaattctttttcatatttaagcgttaattgcctttagacgcaataacaacataacgattgggatcattgccttcagaataactttcaactccttcaatgccagtaattgttttatgaataaccttcctctcactattactcatgggatccatctgataagccttaccggaatctaagacacgtttagcaattttatgtgcaaaatcaataagtgtttttgtccgatgttccatataatcatgaacatttaaagtgacggaaaaatgttttgaataatgatcatgtaaaaaattttgtgctaacaattgcaatgattttaaaaccttgccatgataaccgataacacgtcctgcctctggcgtttcaatttgaagattgatttgacgacgattatgacttgtctcaatgcttgtttctagatccatttcataaataattttttggatgtattgagaaacttcttcactcgccacagcaatatctgcaccattatcaacttcatcaaatgcatcagcaacaaagtcctcaaaagtttgctttcctttttgattgaaggcttcactagaagcagtggctgccgatgttttagttgttaaagcattttgctctaacatttcttgtgcagaaatcttatgctctaagacttgttctttgatctctttatctaatggttgaccatcttctttttctaattttttaatagtttttgacagatgatttaaagccaccgtatcttcagcactgcttgaaacaggagcattttgcttattaatactatccggtacaccacgtactgccttttgatcagccttatgggctgtcttttcattaattccttcaatttcgactcgagctagttttctgccaaaacccagaaagccctttttctcccgcgagatcactctaatatgagccttcatacgagaaatacccatttgtttcaaaccactttcaatagcttcttcaacagtttttcctgtgaataataccatgatttgttctccttattttctctttttatgtgctttctttttagcacgtcttttcttagcttccaattcacgtgcttcatcttcaagacgctggcgttctgcaataattttaaaaggattatttaacaacagaatctggaagacctgataagcatttgagactacccagtagagagcaaccccactggctaaattaaagccaataagcaagataaagattggtaagataatgttcatcgttatcatcataccatttcgttctttggcggccttattagtcagccaagaagataagaaagtaaaaatagctgccaagacaggtaagataaagtaaggatctttatcgccaatatccatccaaagaaaagaccctgtttttaaaaattcaactcgagtaagggcttgatagagagcccaaagaacgggcatctgaataagaagaggaaaaaggctggcatagggattgacaccatattttttgtaaagttcctgactttcctcagccatacgcatacggctttccctgtctttacccggatatttagtctgtaaagctttcagctcaggctgaagctcctgcattttttgtccagatttcaattgcaagttaaacagtggtaaaagaatggttctgataagaaaggtaaagagaataattccgataccaatcctgccattgatggataaaaagcggatggtctccgcaaagaaataaacaaacttctcccaagcatcgcttgaatgactggtaacttgactacgtccacaagccgataaaaacaaaagtgctgcaacagctaatccaataattctatatttctttttcacgaatagatccttcctgatacagtttagccagttttaaaacatgaaccagattttttttcatcgtgctataatcaagttcctcaacaccttttctagcaataacaacaaaatcttgagtgcctaaataaggaccaagttccataaggacatggcgcaattttcgtttaatcgcatttctaacgacagcatttcctaatctttttccaactgaaagtccaacacgatagtgactttgatctttttctaaactatagacaacaaatttccgattggcaacacttcgtccttcagtaaaaattgcctgaaaatctttatcacttttaacgcgataggcttttttcaaaacatgactccaatatctaaattatcactattatatcataaaatgagaaaaagccaaaaatctcattatttttgacttatcaattttgctaaaattaaagtgcttttttagcctctgcaatctgccatttaacctgttcaaaaccagttccgccaagagaatgacgtcgctcaacggccgtatgtgatttaagtgtttcatagacatcttcctcaattaagtcagaaatggtttgataacgttcaagaggaacatcttgcaaataatgaccattcttactgcattcaaggattaatttcccaacaatctcatgggcctgacgaaagggcatgcctttgctggctaaataatcagccaattctgttgcattagaaaaatctttttgagttgattcagccatatgtttgtcattaacaatcatactagatagcataccagccaaaatgtcaagagcaactgtaatcgtttcagcagtatcaaacataccttccttatcttcttgaagatctttgttataagccaaaggcagagctttcataacagtcaaaagtccaaaaagattagcataaacacgtcctgactttccacgaatgagctctgccatgtcaggatttttcttttgcggcatgatggatgagccggttgaaaacgtatctgaaagcgttacaaattgatactcatgagagcaccaactaatgacttcttcacatatacggctcatatgcatcataagaatagaagcattcgataaaaattctaagataaaatcacgatcagatactgcatctagtgaattgctgtaaggttcggcaaaccccataagctgtgccgtcatctcacggtcaattggaaaggtcgtacctgccaaagcagctgctcccagcggagacaagtctgtatgcttaacattaaaaataaaacgttcactgtctcgggtaaacatgttgtaataagccataaggtgatggccaaaagaaataggctgagcatgctgtaaatgggtatagcctggcataatagtatgaacatgcttatctgccaagtcaactaagacagtacgcaagttagctaacttttcaatcacctcatccaacttagctttcaagtaaagatgcatatctgtcgctacctgatcatttctcgaacgagccgtgtgaagcttgcctgccacaggaccaattttagcagtcagaagactttccatattcatatgaatatcttcattggaaacatcaaatttcaattgtccagctttatattcttctaacaagtcttctaaacctgctttgattgttgcggcatcttcttgagaaataattcctttttcccctaacatggtaacatgagcaatagaacccttgagatcaaattctgccaatttttgatcaaaggaaatggaagctccaaattcctcaacccactgtgctaaaccagcttcaaatctgccgccccataatttgtgattttttgttgtcataactttctcttttctaatgataaaagtttaaatccaatttccttaatataacaataagtctgggaccctcgtctcagacttatttaagctcctctcagaaagagcaagtctctcagaaattttttctgagcctgaagtatcctcacaggaataccgtgtcaggagtttttattagaaaagagtatcagatccagctctctgactgtgattatctgataagcttttcttttgaatttttaatgtagaatacccatggcctccgacattgcaaaagttaattgcctgccatctctattaacaaccttgaatcttttcaagcaaataattctctcttgtttaaccttatttgttgtttatctgcgagttaacttgcgttggtaatccccaaagtttaatgaaaccaacggctgcatcttgatcaaaactatcagctgatgtataggttgctaaattttcatcataaagtgaatgaggtgactttctagcaacaacccttgcagatcccttgtacaatttcactttagctgttccattaactgctttttgtgtttccgtaatataagcaagaatagcttgcgttgctggattgaaccaaagagcattgtagataagatttgacaattcattttcaagaatcggcttgaagtgcgacacctcacgcactaaggttatatcctcaatttccttatgagctgttaaaagagtaactgccccgggacattcgtaaatttcacgtgatttaataccaaccaaacgattttcaacatgatcaattcgaccaacaccatgcttaccagcaagaacattaagcttttgaataagatcagccaacttcatttcctgtccatcaagagcaacaggcttgccttctttaaatgtaatatcaacgtattctgctttatctggagcttcttcaaccgaattggtgataccaaacgcctcttctggagcttggttccaaggattttcaaggacaccgcattcatttgcacggccccaaagattttgatcaacagagtaaggattatcaagatcagccggaaccggtacgccattttctttagcataattaatctcttcttcccgtgaccatttccactcccgaacaggtgcaatgacttttaattttggatcaagtgctgcaatagctacttcaaaccgaacttgatcatttcccttaccggtacagccatgagcaatagtagttgctcctgtctgatgagcaatttcaaccaatttcttagaaatcactggacgactaagggctgatactaatggatatttttgttcataataagcatgagcctgcagagcaggaaggacatattcttcagcaaattcatctttaatatccaagacataagattcaattgctccaactttcagcgctttatcatgaataaactcaagatctttaccttcaccaacatccatacaaacagcaacaacatcataatctttttttaaccacgtaatggcaactgacgtatcaagtccgcctgaataagctaaaataactttctcttttgacatagtaaataactcttttctatttttgataattattcaaaggatagacttattatattgcataattattcaaaagtcaagtatatttttgaatttatttgtttttatatattttctaataagagtttcttaaatcaaaaaagctattcttacttgttagtaaagatagcttttttattattacttaaaaattaattaattatttcgtagggtatttataagttaatagataatcatcattagattgctgtgcaaattctaaagagacataacctaacttagaactgtcattagaagcattagaattgtaaaaaattttcaagcttgttttaaagctatcaccataatttgagattgattctctagcttcagtcggatttccatgctttttaagaacttcatttaaattatctccaccctttccagtactagaatcaccaactgttaaagcatcaacatctgcttgtgtccagtcagacttataagatttttcagaaacagtctttatatctttagaagtaaaataagcataaccatccgaaagaataaatttaccattatattgctttctaaaaattaggtgcacactttctcgttcatcgtcgtcaccgctttttctgtattccaaatttaaactttcaccagaaatagtagcattagatcccttaccaaactttttaacaactgattttaagctatccccatttttattagaatagctagaaaattttaagtcagtaaatttagactttgtccatttaaatttaaaatccgaactatctgcaatataatccttaacatctgtactgtcttttgaatcatcatcgtcaacatcggtatcatccttttcgtcagatttctttgattctgtttgttccgtcggattcggattattttgggcctgacgaacaaaaacagcaagcccgctgactaagaaaataagagaagccaaaactagagcaataattgataagactttcttacgttgaatgttaacaattaagctcacaattgcatagataagcccaagaaaggcaataattacatagataattggtagtggggcaaaccaagctaaaataagtgtaataactgaaacaacgaaagaaataatcggaagaacaatgagttccttgcgagctgttacagttggtgcagttggactaactggattggtaaatggcgaagcaacttgttgttcaaaagctgtttgctgtccttgaggagcaactgattccgttggaggcactggcgcttgctgaggaatttcttggttggcagttcctccttcaacagcctgctctagaactggcgcagctgttggattggcatctgttgcttgctcagtttgctcccctgacactgaattgctctcagttggatttttaggggtattttcctctggaacattttcgttattgatatcttctgtcataacatctccttcattttttactttattgtaattatagtactataatcaaacgtttttttcaatgtcttctcttatcttaaagcaaaagaaaagagagtctcaaagcaacaatcctaagtatctgcttgactctctatataaatagactttaaattcttcctgttttcttcaaaaatttccaacaataataggctaaatagaaatctatcattccatgaatcagggaacctagtccaattaaaacaatcaacgtaaaccaataggaagtcgattgctgattagtagttgtcaatagtaaaacaacgagaaattctcccagaccatgaataatattgagtccaaaggcaagaggaaaagagtttttaaaattctttaagaagctggggtatttttgaatgagataagcaccaatagctgcaaaaataagatgggtcaaagcacgcatgacaataacaaaaggaaaaccagctataaagaagcccagacttgtccccaaagcaacaataacagcaacttcaggtgaaagaaacatagcgataaaaataggaacatgactagctaaagtaaaggaagccggaccaataatcaccttaacaggcataatcatcggaattaaaatgctaaaagctgttaaaacagctgataatgtcagattttgaatacgtttacgtatgacagatgaaccagaactagacataagaaatctccttatcagtgataaatctagtttatacctgttgtttacatctgtcaagacactagtttaattattaaagatgatatgctcctgctcaagcgcttcagtgattttctcaaaggtttctttatcacgacaagaaagcgtgtgtaaatgaattccatctgtcaaactgcttaataagctgcctttataacaagagagcttatccatgaaataatcaatttcatcttgattctcaatatttaaaggagcagtaatcatgccataaatcgggtgctccacttcaacatctaagattttaccaccgtttttgacaatggtctccaattccaagcggacttccttaggcccatgcttacagacaagtttgccatggtagaaggactttggtacttgcagacgctcagctaaaagataacctcgatgagtggccataatatcatgattttcagctcgtaacaaagcaatatcccccacaataatctgacggctaactcccaattccttggccaaatacccagctgaaattggaacttgtgtcttttctaacctttctaaaatagcctgacgacgttcctttgctttcatatctgtacacctcacttattagttacctaaatcaaaatgactttgacttatccaaatgaaggtcgaaaaaatttagataagagcttacagttatagcctttatcttcccctctttttatttcaatttttcaagcatatcttcaagatgctgaatggatttttccttacctagtaagaagattgtatctggtaattctggcccatgcatttcacctgaaacggcaatacgaattggcatgaaaagatttttccccttgatgcccgtttctttttgaacggctttaatttgcggaaaaatattttccgatttgaaatcttcatctgacatggcttccaattttgccttgaaggcttggagaacaattggaactgtttcaccagccatgaattctttttcctcttctgacaattctggaaactcttcaaagaaaagatccgttaaaggcacaatttcatcaatagatttcatctgtggctgatagagctcaaccaattttttagccttatctgtcaaacgaccagctgattctaaataaggttttgccaaagcaaaaatcgtatcaaaatcagcatttttaatgtattcattattcatccagtccaatttcttctgatcaaaggcggctggtgacttgctaagacgattttcatcaaagagttcaatcaattcttgacgtgaaaaaatttcgttttccccaccaggattccaaccaagaagagcgatgaaattgaaaacagcttctggcagatagcctttctgacgataatcttcgataaattgtagggtattggtatcacgtttggatagtttctttcccgtttccgagttgatgataagagtcatgtgagcaaatgctggcgcttcccaaccaagtgcttcgtaaaccatgagttgttttggcgtattggcaatatggtcatcaccacgaataacatgagaaatttgcatgtcatgatcgtccactacaacggcaaaattataggttgggtaaccgtctttcttctggataacccagtcaccaccaatattgccaccttcaaattcaatatcacctttaaccatatcatgccatttataaataccagcttcattgacttttaaacgaaccgttggcacaataccagctgcttgccgttttgcgatgtaggcagccttttcatctgctgacataccgagaaattcattgatatagcgaggtgtttcaccagctgcttcttgacgttcacgttctgcagctaattcttcttccgttacataagatttataagcttttccttcagccaagagttggtcaatgtattttttataaagtgctaaacgttccgattgacgataattttcatgcgtttcaggactttcatcccaatccatgcccaaccaacgcagattttcaagctgggagcgttccccatcctcaacatggcgcttacgatccgtatcttcaatacgaatgataaaatcgccaccatgatgacgcgcataaagataattaaagagcgcagtacgtgcatttccaatgtgtaacaatcctgttggacttggtgcataacgcacacgaattttgtttgtcattttattctcctgtcatttcaatataacaaatcctagaaaatgcctaaaaaagacccttctaacctgttttccataaaattcaatcgtttttattatagcatatccttgccagttgggcgaaaaaaattcctttcacttcaggatgtacgcatgaaaaaatgcatatccctaatttctagttacatgcatttttcaagttaattttgtgatttttgctaattctttctatattttcttctttaagaatattaaagcacgtttttacactacagattgtgaaaatggttttctaaaaacatttttttcttcatgcgtttgttctgctttcactttaagtaaaaggaagtttttttatggatacttcataatggtcatatgagctataagacctcaattaacgattagtattggtaatgaaaccctgtaggacaccagcaaactgctgcagattaagactttgtacataaatttcacccgttcctcggaaagtattgacaacgccttcaccggttccgatcgattgcataaagccattttccaaatgaatgtcatagttcaaatccctactccaagctacaacatgagcattgtcaattgtgatttcctgattctgtaattctatttttttgatagaaccaaaactattagcaagcaaggtaccttgaccttctgttgtcataacaaaaagaccgccttgaccgccaaagagggcacgtccaacactctgagctttcatttgatattgagcagaaccatctaaggcaagaaaagcaccatcattgaggcgatattgtttttctcccaattctaaagcaataacttgacctggcatagaaggggccaaggccaatttaccatcgctagcatttgatactgcctgagtaatgaaaaaactttctccagacgttacagaacgaccaattgctcctactagcttgccaagtcctgaaccacgtccattgactttggtattgagagtgacactgggtgtgtgatagaccatgctaccgcgttgaatataagcaaattctcctgtttccaaagtaatttctaccaagggaaactgcatattgctatcaatactatagttcatgcgattatctggcatatgaaaacctcctacgtacatgtgtgtattattattttagtacaaacacattataaaatttccccctatttctgtcaataaaaagtttaaaacaaatttatgatgaagtctaagttaataatagttataaaattttatccatgaaatagccaatttattataaattgacttaaaaattaattaggaagttaattgacttctcttactcgtcctgtatcaacatcataaatggctccagaaataataatatcttcaggaatcagaggagaatttttcaaaagagcaatatcctctcgcacactctcttcaatatctgtaaacggaagaaagtcctgatctccagcatcaacagctaaatcccgctttaactgctcagtaaactcagcatttgtaaaagtctgtgcaccacaatccgtatgatgcaaaaccacaatttcacttgttcctaactgttgctcagaaataaccagagaacgaataacgtcatctgttacacggccgcctgcattgcgtaaaatatgggcatctcctaaagccaaccccaaagcaggtgctacgtgtaaacgagagtccatacaagtaacaatagcaacacgcgtttttggcttaagtggcaagtgagcagttccatgcaaatcaacatatgcttgatttgcctttataaaattatcaaaataagacattaccattcctcggtcctaaatttaagttaatcgcttagagctgtatcataccatttttaaaagactttgtcatagtcaagaacttaaaatcaattaaataccttttttaagacttcactaacagttgtcacaccaattacctgaataccttgtggaatcgttaaacctgacagggaatttttgggtacaaaaatcttggtaaaaccgagcttactagcttcattgagacgttgttcgatacgattaacacgacgaatttcacctgtcaaaccaatttcaccaatataacattcttgagggttggttggcttttccttataactggaagcaatggctaccgcaaccgctaaatcaatagcaggctcatctaagcgcacaccaccagctgatttgagataggcatcttgattttgcaataaaagtccgcagcgcttctccaaaaccgccataatcaaactaacacgattaaagtccagtcctgttgttgtccgtttagcattaccaaaaacagttggtgttactagggcttgtacttccgctaaaataggtcgtgttccttccatggtaacaacaatagctgagcctgttgctccatctagacgctcttctaaaaaaacttggctgggattcaaaacctcaaccaaaccacccgacctcatttcaaaaataccaatctcattagtagaaccaaagcgatttttaacggctcgtaagatacgaaaagtatgctgccgctcgccttcaaagtagagcacagtgtccaccatgtgttctaacattcgcggtccagctaaggttccttctttagtcacatgtccaacaataaaagtcgcaatgttattggttttagctaattgcattaattctgctgtcacttcacgcacctgagaaacagaaccttgaacactggaaatttcaggactcatcactgtttgaatagaatcaataattaaaaaatcaggctggattttttcaatctcagcacgaatactttgcatattagtttcagcatagagataaaactcattgtcaatatcaccgagacgctcgctacgcaacttgatctgctccgctgattcttcaccagaaacataaaaaacagttcctttattggctaattgtgttgaaacttgcaaaagtagggtcgatttcccgatgccgggatcaccgccgataagaaccagactgcctggtacaacaccaccacccaaaacacggttgaattcttccatattggtcttgactctagtggcttggctggaggtgacctgatttaacttgactggccgtgtcttctcacctgtcagtgaaacgcgagcatttttaacctcagcaacttcaacctcttcaacaaaagaagaccaagacgagcaattaggacaacgtcccagatacttgggcgaattatagccgcactcttgacagacaaaagttgtttttttcttagctatggtaattctcctctcgttactattccagcaatctgccattgttgcagtgtcttttgaaatttttccttattgataacgccaagataggataaatcaactgagacttgatagcccttatgtgctgctgccagaattgaagcattgacgcaaccattgccatcaacaccaataaattctaaactctctgcaccgctttcctccaaaaatcttgttaagttttggttcgtaaagcaagatgcttgacgcttttcaaagactctatcagacaccaaggaaaggccaattgcaaaattcttcggtttccttgttaattcccagaaaaaacgattaactatataaatcacatggtctcttgaatagctagcaattttgtcattaacagccgcagtcagcgcttcactatcataagcttttccagcagcaacgtagtctgactgcatatctataactaataaataatctgccattttcttcccctatcctccagttgatccaaaaccgcctgtacgtgtgccagtcgctttatcaccatctattaacagaaaaggcataaaaacaccttgaaccacacgttctccagcttcaagcacaactgtttggtctgtcatatttttcatctgagcaaaaatatggccttcattattagggttattgtaataatcgccatcaataaccccaactgaattaatcaataccaagccttttttacgaggattggacgaacgatcaaaaagatagagaacttcaccaacctgcatataagctttgacacctgttgggaccagaacaattgctcccgcaggaatttccgtccgctctgccactttcagatcataaccagctgcatgagctgtttcccgctttggcaaaagattttcatcagtatagtcagtaattaattcaaaaccacgtgttttcatcacttgcttcctttatcatttaatttatctaaaaaatctttctggaacagtcattatcttgttgtatcagcaacgtgaccaattaagttaaaaccattcaattcctttctattataaattattcgcaaagcaaaagcaaaagttcattcttgcttttcgtctttatagttaaagaaattagcatttccaatcagattttttactgacaaaacagagtagtttgttctttcaaaataaagcagctccattagctaatttcagacaaatgaattacctttatgatataataaacttaactttttatgaactaacaggagaaacaaatgatcagacaaaaaattgccgtactaggtcctggttcttggggaaccgccttatcccaagttcttaacgacaatggtcatgaagtccgtatctggggaaatattcctgaacagcttgatgaaattaatgaacatcatactaacaaacgttattttaaggatgtggttctagatgaaaaaatcaaagcttatcacgatttagaggatgctcttaaggatattgatgctgtcctttttgttgttccaacaaaagtaacacgcttggtggccaagcaagtttcacaaattcttgatcacaaagccattgttatgcacgcttctaaaggcttggaaccgggcactcacgaacgcttatctgtcattcttgaagaagaaattccaaatcatcttcgaagcgacatagttgttgtttccggacccagccatgctgaggaaaccatcgtgcgcgatattaccctgattacagcggcatctaaagatttagaagccgccaaatacgttcaaaagctctttagcaacaactattttcgtctttacaccaatcccgatgttattggtgtggaaactgctggtgccctgaaaaatatcattgctgttggggcaggagcactccatggaatggggtatggtgataatgctaaagcagctgttatcacacgcggtctagccgaaattacacgtttaggcgtcaaactgggagctgatccgctcacttacagcggtctgtctggtgttggagatttgattgttactggaacttctatctattcacgtaattggcgagccggagatgctctaggacgcggagaaaaattggaagacattgaaagaaatatgggaatggttattgaaggaatttccacaacaaaggtcgcctacgaactttctcgagaactcaacgtctatatgccaattacctgtgctatttatcagtcaatttatgaaggcaaaaatattaaagaagctatcacttctatgatgtcaaatgagtttagagcggaaaatgaatggagtaaataatatgctaagtaaaaaagtcagaaaagctgtcatccctgcggcaggtttaggaacacgtttccttcctgctaccaaggctcttgccaaagaaatgctaccaattgttgataaaccaaccattcagtttatcgttgaagaagctttaaaatcaggcattgaagacatcctagtggttacaggtaaatcaaaacgttctattgaagatcattttgattcaaattttgaacttgagtacaatcttgaacaaaaaggaaaaacagatttacttaaactcgttaatgatactactgcaatcaatctccattttatccgtcaaagccatccgcgcgggttaggtgatgctgttcttcaggctaaagcctttgtaggtaatgaacctttcgttgttatgctcggtgacgatttgatggatattacagatgacaaggctatccctttgacacgtcaactcatgaacgattatgaagaaacgcatgcctcaacgattgcagtcatggaggttccccatgaagatgtttctgcctacggtgtaattgctcctcaaggagaaggagttagtggcctttacagtgtcgatacttttgttgaaaaacctgctcctaaagaagcgcctagcaatctagctatcattggtcgttacttattaacgccggaaatttttacaattcttgaaacacaagaacccggtgctggcaacgaagttcaattaacggatgccattgatactcttaataaaacacaacgtgtttttgcacgtgaatttaagggaaaacgttatgatgttggtgataaatttggtttcatgaagacttcaattgattatgcacttaaacatccacaagttaaagaagatttaaaagcttatattattgaacttggtaaaaaattagaccaaaaatcgactcaaaagaactcggattaaaccgagtttttattatgacaattatttattaaaggctagataaaggattccagaagcaaggcctaaatacaaaattaaaatgggcaagcgttgcctaagagagaaaagttttccttcagcaaaactaggcaatataaaagcagagcaaatcccaccaataatccctcctagatgtcctgcaatactaatatcaggcataaaaagattaaaaataagattaaccacaattaaagcttgatagctgcgtcccaactgttttaaatatgggttgtgtccaaaataacctaggacaacaatcgccgcaaaaagcccaaacaaagaagttgaagcacctgctgcaactacatttggagtcaaataaagcgtaaaaatatttcccataattcctgacaaaaggtacaggagcagaaatcgccacgagccccaaatattttctgccaattgaccgacaaaataaagtgctaaactattaaataggaaatgttcccaaccgatatgaacaaaaatcggagtgatcaaacgccaaagctgattgggattgtgaacaaccaagtcaccatacatcccaccaaaattaaaaacagctaaggtggtatttgcttgtcctaaataaacaacttgcatcgtcaaaaaaacgagagtcgttagcaggactaaaaaagaagttgcaggatattttttaaaggtctccactgaccaacacctcctttactggaatgtcaaaaaaactaggctcaaaagtgaactgttgaaaagaataaattgtgctgactgtatcaccctgaaaatctgccaagtattgatcataatatcccgcaccaaaacctatacggtagccttcattgttaaaagcaagccccggaacatggatgagatcaatagctgatttttcaagagcctcctcacttcttggttccttgaggccaaatttagtaatttgtaaatctgcttcatcataaacaacaaaaatcattttcccttgaggataggttttaggaacaactatgcttttattatctctttgagcttgctcaatcagcaaggatgtgtcaaattcaaaaggaaaagctaaataagttgcaataacatgtgctttttgataagcctctaattgaataagttcttccaaaagttgctcatctctgagcacttttttggctttatcttgttttttcaaatcttcaatgacttgagtacgatagtcctttttcatcatgttactatcataacacgattaagatttttttcctacgcttaaacaaaaaaagaatttttaaggaaataagtaaccaaaaggccataaaacattaaaaaagcttgtaacaaaagggttcttattctaataaaataaatattttactttaaggtttctttaaggtttctcatatatactttaatcatcctaaaacaaccactcccccaagtggttggggagataaactttcctattttatttcccctttttcataaatctcctgggcattcaatgaaaattggatgcccttccctttttcttaaaaaaccttgcagacttaaatctgcaaggttttttaattcgttctggtcttcaagaagccgctaatattatcaactgcaaatgacaaagcttcttctctgggactcatcttaggatgatgaagtgcataaggtgtgtcaattcccagccagaacataacaccggggattttattgagcagatagccaaaatcttcaccagtcatagctggtaaacagtctatcaaattgacagcagacgcattttcaaaataagtcatcaattgtttagccaattgagaatcattttcaactggcaaatagccaccttgtttgagtgtaacatctacttctaaatcaaaagaagttgcaattcctcgagccatttcctgcacccgcttttgaatcaaaagactcatgtcctgagtcagggttcggatggttccatgtaaggtagctgtttcagcaataacattattggttgtcccagcatgcatagaaccaaaggtcacaactccgccctcaatgggatcaacattacgactgacaatggtttgaacttgtgtaataaagtaagaagcagctacaagggcatcattagcattatgaggaaaagcagcatgaccgcctttacctttgaaagtgatgaaaacttcacaagtcccagcaaataaggtagatgtattagttgcaatatcaccaactttaaaatctgggcggacatgcaaaccatagaattcatcaggctgccaattaccaaaggcgccatcttcatacatgagcataccacctgcttcattttcttctgctggctgaaaaagaaagagtaagttatttttaggctgtacttgcaccattgtatcaagtaagccaagagcaatggtcatatgcatatcatggccgcaagcatgcatacgcccttcatgctgactggcaaaagcaagccctgtttcttcaacgacaggaagcgcatcaatatcggtacgccaaccgattgttttttgaggacgagaaccttttaaaaagactaaaatccctgtacgccaagtcctctgctcaacaaagtctttaccattggtgatttcagcaatacgttccaaaagataagcttgcgttttaaattcttccagaccaatctctggaatttgatgcaaatcacgacgaattttgattaaatctaaagtcatttgagttttccctttgtaaaagcttgaaaatgtagaaaaagtcttcttttgagactttccttaggtgatacggacggtagcgatgaggaaactttcgtttctttatgtcccaacctgaaatagctttatgactatttcagcctttggaattccatacctaaaaccaagatacaaagggcgttaagcggataaaggcaaaatagggagtacgacgcggaatcattaagattctaggaggactcatctttttgccacaatccgcaagcccgtggtcagttaagatttgagcctaaggtctcaaatcttccgagtgcctgaaacattaaagtttcaggcactcttatcacggcggaaaatctcgtttagagctcgcttcgctcgcaaataagaaaaattaaaatttgcagagcttaaaaattttttacattgaaaaataggtttgtcttcagtctgaagcttgagtcttactcaagcttttatatacttttttgatgtgtcatgctgtggtgtgatatatcgtttatgatcgctacaatcgcagcatagttgctaaaacagtattaagtcagaatctttgctttgaaactaaaaaccaaggtataagcataactgatcttaggcaatccaaaaacaacaaagtctcagagtaaatagacgcactagtcttagttgaccgaatttcctaagccatccaactatgaaaaaattagtcccttggcagaagcagcaacaaagctgtcaaagattatcttaacgcttagaggttacgaagagcatcttctaaagcagtcttttgctgcgttttttcatcaatttctttgataacacgcgcaggcacaccagctaccacgacattgtcagggacatcttgagttacaatagcacctgctgcaacgaccgaaccactccccacttgcaccccttcaataataaccgcattggcaccaaccagaacattgtctccaatacgaacgggatctgcagaagcgggctcaatgacaccagcaagtactgcacctgcaccgatgtgactgttcttaccaacagttgcgcgaccaccaagaatagctcccatatcaatcatggttccttcaccaatttcagcaccgatattgataatagcccccatcatgaccacagcattatcttcaatggtcacttgatcacgaatgatggcacccggctcaatacgagcattgatattgcgcttatctagcaagggcacagcggaattacgcccatcctgctctaccacatagtctttgttttctgttaaattagctaaaagcggttcaatgtccttccaatcaccgaaaagaacattgccaagcttgacaacattttcaggaagagccgcagccaaggctccttcaaaagtcactttgacattagtcttcttttcagcattgccgatgaaagcaatgatttcttgcgcagacattttttgtgcagtcatatcttttattctccaattcaaaagtcgttagttattattatagcaaaaaattgtggtttggctagaggaaaagaaaaagacctctagcagctgcacaaggtcatatttttttattcttactgcttaacttcagtaaaaatcaatttagctgtgtcaccagaaacatcatactgagtattatcaaagttagtcgtaataatctcgccttctttaagtttcacaacaacatctgtgttaccgggattataattctgctctttggaattatctgtatctatattatatatggaaatttcccaccctagattttcaaattcaggatccattgtcgcattagtgtctaacttataggttcccggttcaatatcacgtccaactacatagttaccaattcctaatttattattgtttttcgcagtacttgaaacagctgtaaattttacctttgaaatatcagtaaattccagagtatcgccttcaaaaagaacaactctaattgtcgatgggtattcaatgttaccgctatccagagaagagcctagccaattaatgtataaaccggaaaaagttgatgaacgctctcctgttatatttccgctgccccccgtaatttgcaaatcataaattccaggcataacatcaccatcttgtccgactttaattttatcagtaacataaagctcatttgtagattttgattttttagccaaggcatttaaagtttcgagattcgtgagttttttctttttagagctgcttaccttagcagtagaacctttataggagtcactagcatcatttaaaaccgcaccgtaaatgggttgcgataccaaaacgataacaaaagaaatgacagcaattgctaccgaaactaacgttaacatttttttatttttacgatttacaattaaagcaataatccctaaaaggaaagcaaccaatgctaatactcctgaagcattattgataaaaagaatccaagatgtagccaatactatcactccaaaaaccaaagctaaaatcagcaaaacttttctttcttctttctgtgacttcatttctttatactccttaatagtttattagtcttcaatgtcaacttttatcatgtgagaattgaccgcttctctaacctacatccttgcaatttagacaaacgagttttattatatattttcctgataaagaaagtaaaaataaacatcaagactttcttattgcaatccttgagacatttgattaataaactctttcaattcatcacgataatcttttaaaaattgtattaaatcactttttccaataatagtagcttttttcattattccatattgctttttttgctctttaacactatccactactccttgtcttattgacttgtaactttcggcatctcccaagccatattgtgttacaactgcttcataatttgtaatatattcatttacaataaattgatacattgttaaatagtcttcataagttttaatcttttcaattgttgaatctaaactatctttaggttcaaatttagacttcgctttctttgactttagcaataagtttgaatgttttatttctaccaattgaaaattaaattgggatgatttcgcaacacttgttgaggaaactaaagaagcattttttgatactttagcataaacattatggggaatcaaaactattgcaatactgataaataaaacgattgttacaataatagccgaaaaaacttttccttttatttttttcataaaaatctccttaattttttagaaatatttaaacttatttttttgagacaagaaatgtaacctcaatcatatcatcatacttttcattaacacttaaaacttcgtctactttataaccctcatctgtttcctcaatagtattgccatcagcatcaacaaattcaactgaaaccactactccaccatcttcatatttagttgaaccttgtaagtcatccattaaatcattagctaattttggagctaatccaatacctttttcagcctcttttttgactatatcaacagttaacttactttctgaagaagtaggacgttgtgatggttttgtttctgatttagcattagatcttgtagtttttttagttgatttaataaaggaaatcctagtgccatcataattaataactaacttatcagcaatcatttcatagtttacttttttattttcatcatcttctttaaaaataaaactttttttagatttatcaatagtccaaatataggaagtacctgaacgagttactaacgccttgtttccatcaatatctaactttattttatcttcattatctgtatcctgaatataatgaccatcttttagagaattagtaaaagtaaatccattattgccattcagcataatcataactccaatagtaccaccaatcataaccagtgctgtaatcaaaacagttaaaatggtttttttattcatataatctcctgaataatgtttatgcaaatctattctttattctaatcaactcttaataatatccatataagtttatttaatattgaaatgaaaaactgatagatgccaaatcattgtattcggaatcctcaatagtaccactccacgtaagcgtttctccagttttcataatatgcttatataatttgtcacctgcaaatgtttctccactttctttatcaccttctcttgattgcccttgtaaatctacagaagagatgaccaccgacttgcttcctccagactttatatctcctatgtcaccaagtgaactgatattaatctcaatttcattatcaaaaatagcattaccatcaagttttatatcttgaccagaaacatttttaaacgttaacgttcctcctgtttttgtaacctgaatataattatcactataaactttttttgatttagaactttcatgttttttagcctttgatttagaatgcttagcttttattagataatcgctaaatttggaaatttttccaaatttgactgaagtgatggaggaagaacgctgtgatttttgtccaaaagtacttccataaacatcttgagttgtcaaagttgttgcaatactgacaagtaaaaccattattacaataatagctgataaaacttttcttttttcataaaaaaactccttatttttctgaatatttacgttaatattatattattatatctattaaatgtcaaatatattactggtaattataaaacaatccaagacatcagtctcagattgtttcttctttattttataaacttactcggaaactaactattcttttgttttccttaagtagtgagggacagaaggtcaaatagtccatgaagtattttagaaatccgaggcaattccattctacttttaccacatcgcaataccaagggcgactttattccctaaaaataatgggaatatcgtcagtcaccgctgtagtcacagtatcgttaatgttaatgactaacgatactggcaaaattggaggctgcaacctccaattttagcaatgaaacgacgaaatcggttgtttgcatccgacccaccaagggcttgctggtaaaaaatagtcaagacctaatgcagttaattgagactaacagtgacaactgatacgccaacttctaaggtacgatttatctgctcaactttttttataactggctccaagaacttttgccacggctcttgcttgtgcaatgtttcctgcgataagtgcgatggtggtagctatattgagattttccatacgattataataaagagagacataatctataccgcctgacaataactaaataaaagtctgcattttagtatagatagccgttgctgtttcatgaattccctgcgttttgagttgcttaataacctgcagatccacgagtataataggaattttaatatagttgtcacaccagttaaaagaaaaatattcttataaaaacgaatgttctacaaattagcagtgtataacgttaattgcatcgtaactacttcctaatcaaaaatttgaataagggaacctgcttcaagctgaacagggaattctgcttgtatatgaagtgtccccggtaatgaactttcctttgaaccatccaatgagatagtgatatggccaagtcctgttaaattcttttcaacaacactgccaacagctgtaatttgacagtcattgccattaataacaagatgcccgccctttttaatatgcccacttagatttttattatcaattttataacaataatctgccagatcttgaggagcctcttctccaaagagaataagcatattggcatctttaatcatgctgagagcttctggtccaacagccagcacttttgcttcaaaaattttagtcattttattcccctttttctaataaacaattaagtttacacattttattgataaagtccaatacttgcaatccatgctacaatgacacgtggtacaccatttaggaaacgcgagtaaagaacagatggaacaccgacttctactgtttcagcagttgactcagacaagccaagcgctacagggataaaatcacaaccattttgcgtattaatagcaaaaagagctgggagagccatttgcggcgggatagttcccttaccaatttcaaccccaatcaaggtgccaataatttgtgaaataacagcaccaggtccaagaagaggtgataagaatgggagtgaacaaatgaatccgatcaggataagtccccaaatattaccagccagcggcaccatgagtttagctaaccatttacccacacctgagccttgaataaaaccaatcagaagtgatacaaaggccataaaaggaagaatagtatttaataatgtttgaatagcatcacgcgctgcttgattaaaaacagcaaccactttaccagcccccataccaatacgagcaataacactctgttgtgcacgttgctcagtgatttttttactggtatcataagtgccggtgcctgtttgagattgagcagtctcagctttcgcttctttcgtttcaatactgcctgctgattcctcagttgaggtaatctgctccataccaacagccgaaacataaatatcttcggtaatgtattgggctaaaggtccgctcttaccagttgcaacaatattaatcgtaggtatcccttttttaggataaataccacaacgtagggtaccaccacagtcaacaatagccagagcgatttcttcatccggaatagaggttttaaaaccattaacagcttccattcctgttaattcaacaattttatcaacaatttcaggtttttcaccaccacctgtgatatagataaatttatgcttttcatcagttggtgcaataatcaaagggccaccaaacccaccatttccttttacaattttaatgtttctgtaagccatgatttttctcctttaatctagcctgcaaaatgaaataagcaacgatacttttatgtttatatcacgcttattactgtttgcaaattattcttaatcaagggttttgctcaatgtaattccttgttgtttgcatacccaagcggttgtgaaatcagtcacccagccagaaacaaaattcattaaaagccctactagcagataacgaatagctagatccatctgacttaaaccaagtgtttttattcctgatgcaatccccatccatacaaacaactcaccaggattgatgtgtggaaagacaccgtttgaagtatgacaaaactgcatttgagaagcgatatagcttggcttgtaatactccggcataaagtgccccatactaatcgccattggattcccaagcataaaggcagagataaaaggcagaatcatatagcgactaagcggatttttagcagatattcgggctaatttattaactttttcttctccaagcagagcaatcagtgcattcattgcaactaagagcatcagaactactggaacaatactggtcatccaacctacaaaattgtcgcccccagcttggaaaagtttcatgaacccttcagcaaattttgtaatataagacataataacctcctttatctgtattaagaagcaaagaaaatttagtctaaggttaattcttcactctaactcatttctttgttcaaattttagtttcatgacgtttttttaacttaaaacgtgataataagaatttagtctgtaacctaatatcaagtaatggcgtctgtttgggagactctttataaatacctgcctctgtttttagaaaaacagctctcgcatcttcaatagcaatgcgcagtaacttattttccttacgaatgaggggattatagctgtcaaaataatggatgtcctgtccaatataatctgacatatctttaaaacgagcagccatggtaataccctgcatctttttagcagccaaaaccttaccatctttatcaatagcaaacataacgatagtcccagctctgatcttaccagaccgacgtccaatagccacacgtcctagacgccttaattgcctataaatgctattaaaatgttttatttgctttaagcctaatatgatttgaactgcataggctgctaaagcaaagagaccaaaaataatcataaaattcatcagaatactcctttttctctggtaaatgtaataaagtctgctttgttttccactctttctaaagcttctttgagctctttatcgctagcaattcgaaaaatatcatcatacaattctaaaagttctgcctctgtttgtgttgcaattttattgggaatagctactaaaaagataagatcaacactttcatgatctgtatgatagggctcctcaagaacccctaccattaaaacgatcttttctaatgtttgattaatagtatgtggaaaagcaataccattgccaaatatagtagattgttctttttccctatctaaaatacgtttttcaaaatgatcatccactagccctaatgcttctagtgactgtgtcatatacactaaataatcttgatagctagcagctttggccaatctcgaaaaggtcaaaatgattgctttgagattttttttatgataatgattaacgcgttgccattcctcacgcagccactgatcatcaaaaagatttctaatttgaataactggcgaattaatctgtcctaatttcaaaggaatggttgtaaagacagcaaagtaattatcattagtgtcaggattaaagttttcttctgaatattgagtgatttcgatatcatggccaagtacgcgttttaattgacgctttatcatatgtgctgttccgcgtcccgttgtacaaacaacggcaactcggcgttttttgttttgaaaaatagctccattttcatgtaaaatcatttcgaaataaagggctaaatagctcatttcagacaattccagctgacagccaaaatgatttttcaaatcatcactagcgacttttgccatttcaaaggccaaaggatacttattttgaatttctctatggaaaatatcattagcctgaacatgaaagataagtcgattgataagaaattttaaatgtgtttgaatttcagtaaataaacgttgctcatcaaagttaaccaagagtgtatccttgaccttctttacaaagctttgataaagcttctgcaaactctgcacatcagtcaattgataggtcaatgcgtcaatatattgtgtattgagaggaaaactcaagaaatcttgttcatactgactgagcgatatctgataagtcacttcaatatgataaagcaattgctccataatagctgactgagctagtccgttaacataatagtcaataggagtaagcaaaagttttttccgttgaatgcgagcaactgttatcgaaatggctttagtcagtaactcctgcgtttttcgaggaattttaaaggcagtatatagttcttctaaaaaatcatgcgtctctttctttaaggtagctgaatcaaaataagaatagacatgatgaatataaaagagccgtagatttaattccgtaccaataatttccaaaccacgattaggtttgccgaatatgcacaattgatattctactgctaaatccttaacatgcttcaaatccttattaatggtcgttcgactaacaccgatttcctcagccaaatcatcaataagtaagggagatgtggcttgaatcaaacgtttaatgagataagaagctcgcttatttgaagaattaaaatcactctctttgcgcaaacttcccgctaaaattgtttccaatctagcataatcatagacgtctaacagcaaaagattatcttcttgtctgatttgaatatcatcatccaaaatagcattaaattgctctatacttgtcagcaacgttttcatactgacattaagttctttacgcatagtttctagagaaacactatgctgagcaactaatatttctaaaatatgataccagcgattaactaatgccacttttttaccctctatattgatttaaccgcgcgttttacctccggcaacattggttgtgatacctgtgatataacttgaacggtccgaaatgtaataagctaccaaatctgcaacttcacttaatttcccactgcgtcccagtggtgttgtcgttgttgatgcgtaacctgcacgaatttcctcaactgtctttcctctagtatagccaagtgcctcttcataagcaagcgtccgcagacctgttgcttccatgattcccggagcaataccaacaactcgaacaccgtatttgccaagttcctttgcccatgatcgtgtataactataaacagcagccttggttcccgcataagcactttgtccttcagaaccttctaaaccagcttccgaagccatattgataataactccttttttctttgccactaaaaggcgccctaccgcttgactaaccaaatagaggcctttctgattaatcatggtaatcttttcaaaagttgcatcatcaagctcgtattgcccatgaggatccttaggatcaactaagagacgtggaatattgatgcctgcattattgacaacagcatcaactgttccaaaatgttcaacaacagctgcaacagaagcttctacttgctcacgggatgtcacatccactttctggaacaagagattttcatgcttttctccattatccgtgagatcaaaattagcgacttttaccttcaagctcagtaattcatccacaatagcttttccgatgcctgaggaagctcctgttacaattactgttttgccagcaatatttaaccaatcagccatttcttacactccttgtctttcttttatttgttataactattataaagcgctcacaacaaataattaagacactcttttttgggctattaaaaaatttagcatactaattggcaaaataaaagccaagacaacagccttggcttttattatatttttatcattaaactaaagacgtgcgtttaactcagcaccaagttcttcgaatcctggtttgccaagaagagcaaacatatttttcttgtaggcttcaacacccggttgatcaaatgggttaacaccatttaggtaaccagaaagtccaatagccaattcgaagaagtaaatcacataacctaatgtaaattcatcctgctcaggaatagtcaagaaggtatttgggacacccccatctgtatgagctaacagtacgccatcggtagccttcttattaacaaaatcaacatctttgccttgaagataagcaagaccgtcaagatcttctgctgcttctggaacaaggatattcttacgtgctttttcaacacggataaccgtttcaaataaattgcgattgccttcttggataaattgtccaagagaatgcaaatctgttgaaaagttagctgatgttgggtaaatgcctttttggtctttaccttctgattcaccggctaattgtttccaccattcactaaagtattgaagggatggttcatagttagccaaaacttctgtcacataacctttacggtaaagaatattacgaatagccgcatattgataagcttcattttctgataattcagcagacgaatagtcttgacgagctgcttctgccccagccatcaactgatccaaatctgctcctgaagctgcaattggcaataaaccaacagctgttaaaaccgtaaaacgtccaccaacactatctggaacgacaaaagtttcccaaccattggcatccgcttctactttaacggctcctttaacacgatcagttgtcgcataaatacgttgattagcttcttcttgaccatactttttaactagaagatctttgaaaacgcgaaaagctatggcaggttcagtagttgttcctgatttagaaataacattaaccgaaaaatccttatcagccacataatcaacaagatccgcaaggtaatttgaagaaatcgaatttccggcataaagaatttgcggtgctttgcgttcttccttattttcaagattgacaaaagaactgttcaaaaaatcaatcgctgcacgtgcccccagataagaaccgccaataccgataacaaccaaaacttcactatcagatttgattttttcagcagcctttttaatacgagcaaattcttctttatcatagttctgaggtaaattcagccagcccgtcatttcagcacccggtccagttcctttacgcaaagcctcatccgctgctgttacttgcatttgaatataatccaattcatgtgaagcaaggaatttccccaatacttttgaataatcgaatttaatgtgtgtcatttgaatcctccaaaatttcttcttttctatgatatctctttcactaaatttaatcaagcaatttttatatataaaacgctttcatttttattttcttatttttttaactcccacagcgacaagagaacaatcgtttgcatatactttgcattttctcattcactaacttccatattggttgatataatctgttatttctatacaatggtatagccatataatctaaaacaagattttgtcctctaattgatttactctgatcacttaataaaaatcggatggaataactaacatcttctaaatcaataaatcttcgataaggaattttagttagtaaacgtcttccaaatcatctatacaaatataatctaatttcatattgcattttatcacaaatttatgaaattattattgttatctatttaccttactattacacaaaaaatagagcacacagcttacatcgcttagggctgctggattcctcccctgacccgcttcacgcaaagctgttgctccgatatctattatagcataaagtaaaaaaactgccaacttaagactttttcttttgccaaaaagcaagagctaagaggcaaatcatcaaaccaactagggctgggacgacaatagtcaagcccgcctgtccactgtccatataagaccaaataatttttgaaagggctgtgataatcaaaattaaaccaactaacttccaactatgtagccaagttgccctaacaatgacgataaaaaaactaataaccaaaaaggcaaagagcacattcttagctgtcaagcctgcttgtaaaaattccttctcataggttaaaaactccttgactaaaggtggggttgattgtggcacgggaaaccaaatcatgcttgtaaaaagagccaagatactaaccgatacccccatgattcgtctatgataggcaaaaaacaagatgggaaggattaaaataggacgaatataccagcttaattggttttgatgacgttcaaaagcccaagcttgaaaatctaaattcaaaactagcagaccaacaaagagtaatgttaaagcaaacaaaaaagctgataatagccattcctgtggcttggtgattgtattcattttgttctcctgtatctaaaaaaactctgcatcatttgagcacattctttttccagaattcccctctctacttctacacgatgattgagccgctcatcagttaggatatcatataaggaaccagccccaccaaatttagcatttttggcaccgtaaatgacctgcggaatacgtgctaaaccaatggctccgctgcacataatgcaaggctcaatggtgacaaaaagcgtacaatccagcagacgccaactttcttgtgttctatttgcttgattgatagccataatttcggcatgcatgatggcaagattttcctcttcacgcgcattatgaccacgcccaatgatttgatcgtccttaacgataacacagccaataggaatctcttctttttgaagtgatagctgagcttctttgagagcttctcccataaaaaactctttttctgcctgagtcaaacctgccatcagcagttaccgatttgccatgatttgtgaggtgtagccaattccacagggatgccattggagtatgcctcagtctggcttcttaggatttctagatggttgtctggatcaatgcctgctggcggtactggtggcatatgggtcaagactagacgttttaccttagccgcactagcgatttgtccagcttctttggtcgtcaaatgagcgatgtggttttcattgccttcgtaaaggtaaacatctgctaaaaagaggtccgcgcctgcggcaaatttatctaaatcctcaaaataacccgtatcacctgtgaaaacaaaaatttgaccagttgtacgctccacaatacgtatggcgtagcaaacaacaggatgtactgtcttaataaaagtaatgtcaaaagatccaatttgctcaagaccattgacattataagctctgccttcagaaacaccatcaagtgtcaactttgaaaactcataagtatcttggtcatgaccgtaaatcggtaaaactttgggcgtccaaagatgtttaggataaagctgaaaataatgacgcaaaacgcccaagtcagcgacatggtctggatgatagtgagaaataatgactgcatctaaatctagcgggctaatttctttttcgagttcattgagtgcacggctaccgcaatcaattaagagctgaaaaccgtcttctcctgtcaagagataggaggttgttccttcatctttatagggataggctccccagcaaccaagtgtggttagtttcataaaaacaccttcttttttttagttatttttattataacaaaatgagctgctctttggataataaaaaccagcttatgttatctaaaaaaagaataaatcaaagcgataatgaaccaggcataaacaataatgaataaccacttcaaataaacaacaatagcaataaattcacgaataaaagcactgggaatataataggcggctgttgaacaacccaagccatctccagccatatgcaatcggcgtgcataaacactggttcgaaagacatgataagcattagttacaaaaagaaaacgcggttttttcatttctttttctgctaactgcttggaaaagagaagattttcataggtcgaatgcgattgttcttccaagagaagcctatcatttggaatatcacttgcctgttttcgaatataattggcaattgccgctgcttcagaaatggtttccccagaacctaaaccgccactggcaatcaatttgacttgcgagtttttcgattgtctaaaggcttctaaagccttatcaatcctgcgctttaataagggagtcacttgattgccatgcaaaagacctgcaccatgaataataatataatcataatgcttgtttttaggaataatcagataaagaatcgaatacagcataaaagctataaaggcaacactgaaaataagaaaagaagcgcttaacaaggcatacaaagaagcaataaaacgattgaataacaaatgagtcgaatggtgaattcggattaccatgaataaaaagaagctagtaatcattagccctaaacaaagcgataaaaggttaatcttcgagaaaccttctttatgtaacagaataatcccgttatagactaaaaagagaccacccaaaaatatgataagaggagtcgaaattaaaagaagcaggaaaacgccataagccgtataataaccatgactatagagaaattcaatgatagccaaatagcttaccatcaagaagacgataagaagaatgggattgagtaaacttcgtgcctcatgataaatagaaaccactaacaaaataaacaatacaactgcaagcaatcctaacataacatctccttatttttattacacttaaatttttaatcttgattgtcacatttgaaattctcttcattttttgaacaaaatacttaaaaaattcaaaaatagcaaagctcttctaataatcttagtcttttgtaacttctgaggaattcttccatctttattttatctcaaaaatcaagatagaaccttacacctttgtaagtcctcaaaatatttttttagattatataatctaaaatcatctagtagagctagatgatttcagagtgtagacaaagtctcgattaaggctcacttcgctcgcaaatcaataccatttaaattggcatttgcagaacttcaaaatatatatgtatagaaaaagtaggtttatcttcaagtgataataactctggtaaacagaggcattcacccttataaaaaattttaatctccctttaaaaactgtaattgtggccatttattttgccaatgctttttcagaagacgttgctggtaaacccgcattctctcctcatctgctaaaaaatgtggtgtgggggcaactttaaattgaacaatatcctctaaaccatagggaaggaagagctccaatttccctttgtcatttattctagcagcgagggcagtgcacttttctggatattttgcaatagcatcgcaagaattatgataaggctctgtgtttggactgtgaacatgcatataaatttgatttttgagctcccattgataagcaggataagctgcctgtaactccttctcaatcctcaaagtcttttcataagaaatcgtctgatcaaaaaagacaacatcgatatccgtctccttatcaaaggctggtttcccacttaaataattccaaataaaattgcgaagtgtgcccgcacacaaccaagcatccgaaagtttaagatctcgaataatggttaaaatacgagaaatcggttcatttgccagcagtaatgtctttaactgctcttcatccattaaaaattcctctctgagcgtccatagccgtacttttcaataaagtcctcacgaaattctaaaatattatcatccataatggcttgacgaattttctccataagatttagtaagaaataaaggttatgataactggtcaagcgaagtccaaaggtctcatctgctttaatcagatggcgaatataagcgcgtgtataattttgacaagtataacaatcacaatcatgatccagcggcgtaaagtcttctgcatactgagcatttttgacaaccaagcgtccccttgaggtcatacaggttccatttcgagcaatccgagtcggcaagacacaatcaaacatatcaacgccacggataaccccatcaattagactgtccggtgcaccaactcccatgagatagcgaggtttattttctggtaataaaggtgttgtaaagtcaagaacggcattcatttcttcatgcgattccccaacagcaagaccgccgatagaatagcccggaaaatccattgaaaccagatcagctgttgactgacgccgcaaatcttcaaagcctgccccctgaacaatgccaaaaagtccctgatcctgaggccgacgatgagctttgaggcctcgctctgcccaacgactggttcgttcaattgaagctttgacatagtcataaggctgataaaactgcgggcattcatcaaaggacatcatgatgtctgaacctaaattattttgaatagaaatggccttttctggggtcaaaaacattctagctccattcagatgatttttaaaagtgactccttcttcagtaatattgcgtttttcagccaatgaataaacctgaaaaccaccagaatcggttaaaatcggctgatcccaattcatgaatttgtgtagacctcccgctcttgcaaccaagtcatctcccggccgtaaccaaagatgataggtattagccaaaatgattcctgctttcatttcttttaattcttctggggattgtgttttgacagtagcctgtgttccaactggcataaacataggggtgggaaaaattccatgcggtgtgataatctctcccagacgtgctccagtgtgtttttctttcttaataagacgatattgaatcggtgaatgtgtcatttttactccttgctttcaagactgtattttggacagtttaaccttataaattttatcaaaaaagctagcagatgtcattaagcgtacttcttagaatctgcattcagaactttttatcagtttttttgagagtataagaaaggtacaacgaaacacctacactatagctattggctgattttacactaattaatatgagacatattatcaattcctcatactaagtgctgtaggatttttcattttaaatttcaattgaaaattaatatccaattaagtcttttgcactcgattaacacaacagttaagttccgatttttgaaacggtttcaggttcacatctctactaaaaacagttataatgacgatgttagtagatatactaacaataaaaaagggaggtattcacatgaatacaagaatgatggaacaatttgaaactatggatgctgaaacactttcacatgtaactgggggcggtctttacgatggagctaatggctatgcttaccgcgattcccaaggtcactgggcttataaggtaacaaaaactccagcacaagctttaacagacgttgtagtaaatagctgggcttcaggtgcagcaagttttgccgcttacgcttaagtcattaagataatcgttcatattgttatataaacggcaaacacctcatctattataatagatgaggtgtttttttgatattatcgcataagtatgaactagccaatctgtttgaaataaacgacaatccttttaagtgctaaaacaccatgaccagcacaaacgctaaatgttttttgataaattgccctcttagtttaacttgagatattcaattttaagacatttattcatgacaatctggtcataaccggcaaaccgtaatattttttccgcttcttggctttgcagtcccaattgtgcccaaaaaacatctgcatctgtttcaatgaaatccctagcaacatctgctaaaaagtcactgcggcgaaaaacatccacaatatcaatatgttcgggaatatcctgcaggcgagcataaaccgtttcacccaaaatctcatcaccaacagccctaggattaacaggaataattttataaccagcactttgcaatacctgagcaacatcataagctgctgtctcttttcttgcagataagccaactattgcaatcgtcttggccctttttacataatcaaagatgacatcttgactaggattttgaaattgataagccataaaatgacctccttaactttttcgcttgaatttcctcttttaaatcggtaagtgaaactaacaattgctattaaagtaataaataaacctgtttactttgcctcataccaagtctgccctgcattttcatctgccacaagtggtacagaaagttcaatagcagattccatggtttccttgaccaacttttggatcgcttcaagttcagcatttggcacctcaaggacaatttcatcatgcacctgcaggagcatccgcgattgataatctccttttttcaaggcttgatcgagatgaatcatggccactttaagaatatcagcggcgctaccctgaataggcgagttaatagctgttcgctccgcaaaagaccgaatattgaaattgcgtgaattgatatccggtaattcacggcggcgatgaaagagcgtttcaacataacccttatcacgcgcttctcgcaccactctatccatataatttttaattcccggataacgttcaaaataggtttcaatgtaattcttagcggctttgcggctaatacccaaattattagccagaccaaaatcagaaatgccataaaccacaccaaagttaacagccttagcattgcggcggtcattaggagtgacgtcttctggtctttcaataccaaagacacgcatggctgtagaggtgtgaatgtctgctccttccttaaaagcagcaattaaatgttcatcgcctgaaatatgagccagcacccgcaattcaatttgtgaataatctgaactgagcaggacactctctttccattcaggaacaaaagccttgcgaatgagacgtccctgttccaaacgcacaggaatattttgtaaattaggatcaacgctggataagcggccagtttgcgttaaatcttgcaaataacgggtatgaatcttgccatcaaaggaaatcgaatcttgcaagccaatgatataggtggattgcaatttcgcaatttgacgatattctaaaattttagcaacgattggtgaacgatgagccagacgttccaagacatcaacagctgttgaataacctgttttcgtctttttagtggctgacaagggcagacccaatttttcaaagaggataactcccaattgttttggagaattaatattgaacgcctcaccagctaaatcataaatctcctgagtcagagcctgcaattcaatctcattagcccattccatgtcctgcagcgtttcttttctaaccgaaatacctgcaatttccattttagccaacacatttgccagcggtaattccatctcaaaaagcaagtccagttggtcattggcagacagtttctgacgcatcggctcttcgctagcaagcaagacactgatttttttagctaaatggctgagcagaacatttttttctgggatagcacgtttagctcctttaccatacacatcatcgtctgtttctaaaggtaaatctgtgtaaagtcttgcaatggtcgaaatgttattattttcaacagttgacagcaaatatttggccaaacgactatcgaaactagctgtcagcagatcaatgcccaaatgactcagcaagaccttaccgcgcttaaaatcataagttttaataggttttgacaaggcttctttaaacaaatcatgcgtcagcaaactggtatcagttgtcgcataaatcgcttggtcatctccccaagccaggccgatcatctcttgggtatgataattatcattcaaaatttcaaaataaaagaattgatcaggcgcaaacatatcaggcttgagttcagtcacttctgtataactcacttcaaaattttcggctttagatgaactgtcaagttgtgatcgaaattgtctgaagtccatttcgtcataaaacttagccagtgcatcaagctgaggaccagaataatcaatatcatctaaagtgatggtgatcggtgcttgcgtatcaatggttgccagtgtcttagaaagaaaagccttttctttatcgttgatgagattttccttcatcttagtcgttttaaagctatcaatatgttcatagatagcttctagactgccatgttcatgcaacagtttcaaacctgtcttctcaccaatttttgttacccccggaatattatcagatttgtcccccatgagagccttgagatcaataaattgcttaggcgtcagtcccattttttccatgagatagtctggtgtaaattcttcaaattcagcaacaccttttttggaaatctcaacagtcgtattactatcagtcagctgaatgaggtccttatcaccgctgacaatagtaacatcatatgcatcctcattttcggctaatttatcaagggttccaataatgtcatcagcttcataattttccaaatcataataggaaacacctaaagcggtcagcatctctctaatataaggtagctgctcacgaaattcttccggagttttagcacggcccgccttatagtctgcaaacatttctgttcgaaaggttgttttcccagcatcaaaagccactaaaacatgcgtcggttccacccttttcatcatatgatccaacattaaatgaaagccataaatggcattggtgtgtaaaccagcaggatttttaaagcggtcaatttgattataaagtgcaaagaaagcacgataagcgacagaagagccgtcaatcaataataattttttcttgtttgtcataggtctattgtaacataaatcctagtctttactctctttaaacactgacaataagattaaaaagaagtaaacaagccacaaaaaaatgagacactattgcctcaagcttcatttttatcaaataatcgttggatttccttcaccaacatcaaaatcttccactttttctccattaaggaagtgattttccccatagtttcttcacaatttgcataaaagttaggagcagctatttgatttttcttaccactatcgtaaagacatttacagacaaacatcaaatcttgagtattgccatgcaaggtcataattttacgggtcagtactttttttgcaaacatgcgttttatggggtacagatagggaagttggcaatttgtaaacaaacagctcattattgtaatttttaagaaaaactctgcagaattactgcttctctggctctgatggtagcgaaagatgcaaaatttcaaaaacgtttaagtttgtattaatcggcttctccttccaaaaagtataagtgactttcttccacttgtcaggattgtaaacaactactttccccagttccttatcttccaattcggcggccatcttcgtgtccttaagtgaagctgaaggtgaaatatccaacacctcttcggttacccagcagctctggctgaaatcatctgtcagtaaaactgtcgatgttatgcctatctggatagactgccagccgaaagatttcaggatattctcaaagggtccctcaaaaataaatttagtcataccttccgatcgcttccaaatatagagcggacagtagttattggtcagttgcccttgagcctgttcactgatcaaaaaagccttaaacagcagatccggaaaatcatccatcagatgacccgttttcgccaccctgcttctgataatactcatatcatagtcactcggcagggctatctcatatctcattgcttgcatatcaacatctcctaaatttttagataaatcaatggtagcactatttcactcttttgcctaataccaatttatgatatactaatcataaataatgataggtaagtgtagccatgaatatcaaggatttagccatttatatgtccatatacgagacccagtcgctcaatcaaagcgcacaagtcttggggtatgcccagtccaatctgacagccagactgaagaatatggagaatgaactgggtgcagcatttttcatcaggcagccccgagggctgcagccaacagatcagggcaaacagatgtatcgctttgccaaagagactttagagcatttggcaaagttggaaaacagtttcaatcagaaaaaacgccgcattttgacttctgagattctctttaactatgctctagctgtcaatcaggatattgatcttacaagcgacaagatggatatctgcaaaactagctgtatccctgcgcaagctactgccaaatcctatgacatcatctatagctttcagaggctgcctgctctgaagggctatgagcagcgcacagctgaactgacagcagcctttctttcttcaaataaacccaaaggatgtgcgaaactgcctctattgattaacagcgacagcgattgtccttttagacagataactttgaaaacagttgaaaagacagataaggttttagagattaactcactggaaaatatcctcagtcttctggagcagggaaggggctccgcccttttgccagaatacctcactcagactaaaaatctgcaaaaaatgagacctaaaacagtccctatcacttactttatctacataagaaatgtctcctgaaaccagtgatctcaggagactctttattttttatagacagattagtcaagttagtttactgaatgcttcctcataagcttgataaaaatggggtgcagttatgttcatgtcttggccgctgtcataaacacatttgcagacaaatagtaaatcactaagattattgtgcaaggtcatgattttacgggtcaatacttttttggcaaacatacgcttcatgagcggtacagacaggaaagtcggtatcttataaaccatcagctcattgctatagtttttgagaatcagaccacgagctgctacaatttgcgctgtttcacgaattgccagaacggctgtctttaaggtttgggacgaattcatggcagcttcaacagctgctactgtatcggtcatttcagcatacttgccaatagctgagatgacacctgcattgatgcccatatgcagccaaatccactccagcatatcatagggctgttccaattgaatctgacagtcagcaaaaagcttcgctaacttctcatagttagaaatagctgccttttcctttctttccagcataaagtgatcaaaaaggcagcaagtcagcctattgtccctgatattaccgccagccacaggataacctaaaatataagaatatcctttcactaacttgtcaacataggcacgatcttcccaaatcccgcaagccagaatcaacgttccagaaataccatctgctgccagactgtcgatcacagaagtaaggccgcctgatgggacactgacaaagataaagtcataggttttgctcgagcagtgcttcacttggtaaacatcacagctctggatgccgtctttatcagctcgaccatccagcaagtctacttggagttgtttaacagcagctttaggactgtcttttctcaggtaatgctcaacctcatggcccaccttttgaaaaacataaccatagatactaccaatcgttcctaaacctattactaaaattttcattgtaacatttcctttctttactgacggcgttttttgataagtgagttgatttcctgcgcttcttgtcctagatagaaaagatctaagagacgggatatcaggtagataatcagaccgatagacaaaagcacccagagactggcattccaatggaaagggaaactaagactgtagataattccctcaataataacaaggtcaagaaggcttccgactagttcttgttgaaattcccatttttgcctcgtcagcaaggccaaatgaatcaaaatattaaccaaaaacacttgaaaaatagtaaccagtaagagccagtgtgcttgaaaataaagagcaaacaaagataacaaaattaaactaattcctgtcgttgcaaagaaatttgtgactgcttttctcattatcgaattcctttcaaagcttctttaacatctggcaaatagcggcggttgacaatgaccttttcaccattcaataaagtggcttccatacggctgttgaaaagcgggcgtatattctccagaacattgatattgagcaagcaagacttgctaatctgaacaaagccatcatgttgtaggtcatgaagcaactggtaaagttttaaatccgtctgataaacctcatctgccaagtagacaaaggtttttttgtccacactttcgatatagtaaatatctgaaaaattaaccaaatactttctgccctcctgataacagctgagctgcctgtctactgtctccagaaaaccgagaatgcgctcaatcaacttatctttctgaccatatgtgatatgaatttctaattccttatactggtcatcttgctcaattcgtaatttcatagtacccattataacacagcttttccacaaaaaatcctgcatcaaccaagttgcaggattaaataactgaaatacaatctaatttacgaatgcaggaatttttcgactttgtcagtctgctgatgaagaaagcgcagattaaccaactgaagagggaatataaggactgtcagcatcaataaaagcatccagctaagtgtctgagcaaaacaaaatcccatgatagccataaccagtaaaggaagagttaatgctgcagtgatacttccgggtacccatgtacgataggtaatggcttgagaaatatgagaaaaaagatggaaagtatgtcccaatgtgatagctaataccaactctggtactttaaaaagaatgcctgtaagcagaatcagactagctaaaacaaactcttctaagacagctactgcaatattttctgctgaagggtaatgctttctgcctgagataaatatctcattggcaaatttgggattgctcttgttcttagcaatccatggacagactaaaattatttcttcaaactcgtgtatcataaaaagcgttatagcgataaaagcgaatagtgctgctgtcattatttctctcctttattcaagataccaaagagcattagaaatccgtataaaaataggaaactgacgccgtgtcgccaagacacaaggaagtttatcttttttactaggatttcagctcgtgttcaatttacttaagatacaaaggcataagcgacacaccgcaaaataggaaagttgacgaaaatgctttagcattagaatgtctttatcttttttcacagtgtcgtagccgtatcaatttattaaagagcggtttccttatactgctttaatgtcttgccggtccattttttaaaagcccgcagaaagctggacttttctgagtagccgactaaataagcaatctcatcaactgacatagataagtcaagataggaaaaagtcatcaatttttgcatgtgtaaaacttcctcattaaaagttgtatcctcagcagccaatttacgttgcagggtacgggcactgagccctagtctgttagctatcattgcaagggaaaattgtccactggggatggcagacagcaactctgtctgaacggcctgagtgaaattgtcatcactatgaagctgggacaactgctgattaagacttaacttcaaatgataccacatgacattattttcagtgataaaaggtttttcaagatctgctttagataatattaaacgattataatctgtttttttcggcaggattcctgcttccttctcaagaagtcttccataatcataaggagaacttatttcgtaaggaagaatgcaagtccctgttcccgtccgtaagagacttaaaagaagcaactgttcctgcagcaataacatgcgaggaagcggaagctgtgatgaacagtaggcataacttacagaaatttcatctccgccgtcttcaagctgtacttttactggaccaatcaagcttttatatttcgaaaaacgctgtaaagccgtcaaaccatcaggacttgccaaagcagcaaaaaaggccggcacaaacttcttaatgttttcaattctgctcaaagctaacaaggcttcatctgtaatcagcttatctaaggttgctataaaacaatagtactcctgagcattataagtaagctcttcttgccacagcttattaggaagctgtgctttttgtaaaaccagcctgatatctattcccaattcttgtaggaaagactgaaattgtttcgtaatcatcagtttcataatcattaccccaagtccaacttgaacagccaagtcattaatacatccgttcactttatgacttttattaaaaatgcttcaacttctagtcagctcatttaggtgacatccctaacttgcaacaattttttttcacagattattataaagcaaaaaagtggcttttgcataggacaattaatgacactacaatgacaattgatgccaaaagtctcacattaactaagatgcaggattggaaagctaagatataacactcaacttacaatttaggttctcactaagccttttcatttttttactgcttacaaaaggccatggaaaatactcacagtatctgttattcacgctaaactaactattctagtctcttacctgttattcttcacaactcaatttcatagaaaaacaccccaaaagttagattttaggctaacttttgagatgcaggtcaaaatcaatatttctaagaagctgtttttaaaagcttttaacattacattttttaattttgagaagaatgtcactccttactcagatgaatttagaaaaatactatttcagttccttaacaactttaaccacattatctactgtaaagccataattttcaatgacttgagcagcaggagctgatgctccaaatttatcaataccgataaccgcaccatcaagaccaacatatttataccatggttggctggctgccatttcaatggctacacgacggcgtactgaatttggcaaaatagcttctttgtaggcagcagattgctcatcaaagagctctgtagaaggaacagaaacaacacgtactttttcgccttgtgcttccaattccttagctgctatgactgctaagttaacttcagaacctgatgccaaaaggatggtattaaagtcagaatctgtttcataagtaacataagctcccttagcaactgaagtaaagcttgaaccagcttcaacatcaagattttgacgtgtcaaaacaagagctgttggtgtgttttggcttgtcaaagcataatgccatgctgcctgtgtttcgcgagcatcggctggacgaaaaacaaccaaattaggagtggcacgtaaacctgccaagtgttcaatcggttcatgagtagggccatcttcaccaacggcaatcgaatcgtgggtaaagacataagttactggtactccttgaagagctgacaaacgaacagctgctttgagatagtctgaaaagacaaagaaggtaccgccataaacacgcagtccgccatgaagagccataccatttaagacagtacccatagcaaattcacgaacaccaaactgaatgttacggttaagcggatgatcagcatcttgaagcccatctgctttaatgtaagtcatgttagaatgcgcaaggtcagcagagcctccaaaaaagttaggtagtacgtctgccgcagcattgatggcatcttgactagaattacgcgttgcttgagagaagccattttcgtagactggaaaatcagcttctttgatttccacaggatctgttccatcaataattgcatccacttcacgcgcctctttaggataagcttgtcgatattctccaacaagatttgaccaagcatcgtaagcagcttcaccacgatccgcaacattttctttgaaatcatcataaacctcttgaggaacttcaaaaggagcatagccccaattgagagccctacgagtagcagttgcttcttcagctccaagtggtgcaccatgaacagcattggtaccgcctttagttggagcaccgtagccaatcacagttttaatttcaataagagaaggtttgccagctgcctttgcttcttcaatagcaagtccaatagcttcaatattattgccatcttcaactaagattgtatgccatccataagcatcatatcgtgcacgaacactttcagtgaacgcatcattggtttcaccatccaaacaaatatcattagaatcataaagaacaatcagtttatccaaattttgtttggcagcataggatgacgcttcgccagaaacaccttccataaaatcaccatcaccggcaataacataagtatagtggtcaaaaatagggtagccttcacgattgtatttagcagctaagaaacgttcagcttgagccaaaccaacagccattgaaatcccttggccaagagggcccgttgtcacatcaacacctacggtatagccatactcagggtgccccggtgttttagagccccactgacggaaatttttgatttcatcaatagaaatatcttcaaatcccgacaagtgcaagagagcatataaaagcattgagccatgaccagctgacaaaacaaaacggtcacggttaatccaatttggctgacttgggttaacacgtaaatgcttagtatatagactgtaagccattggggcagcgcccatgacaacacccgggtgacctgacttagacttttcaatagcatctacccctaaaaagcgaatggcattaaccgataaatctgacataatattctcctttttaatgtagtcatagatattttaacataaaacgcttacttgttccatatatccaaataagtttaaactctttcaaatacccgcatatcgtgcgacatgcggatataaagtttaaagacataattaacattattttatgtactattgaacgataaatcaaccaataattgattcgctgttcaattgaggaaacaagacgcagccataattaaagttaggcaagccgaagttgacgaagagggaacagatgagatgaatgataacctatgattgattttgcctttcagtttaagaaatgaaccggagatagaactgaagttcagcgaggtgaaattgacaacgaatgaaaagcaaaaagcaattataggagggctttgaactggatattagaatcatgctcaaagcagtcatcaaaaccgcgtgggtgatgatattcaattctatccttatcttgtgggtaagtgtatttaccaccaacttcccaaatgaaaggatggaattgatattgcaaacgttctttacgcatcttccaaaggacaagaatttcatctgttgaagccatgaaattagaccaaatatcgtagtgaacaggaatgatgactttggcacgaagattctcagccatacgaaggagatcgattgaagtcattttatcttgaataccaactgggttgtcaccatagttattgatagcaacatcaatatcaaagtctttgccatgtttagcaaagtaatttgagaagtgagaatcagcaccatgatagatggttccaccaggagtttcaaagatatagttaactgccttgcgagccatttcctcatctgtaacagcaagtcctttaaggtcgtcattgttctcttttgcaccctcaactggtaaggttaccagacaagtacggtcaaaggattcaacagcagttactttaatatctttaaattcaaaagaatcacccggtttaatcacgataatgcggtcttctggcactccccattttttccagatttcgccacattcatatggtccgacgaacttaacatggtctaatttgggattattaacaatagctgcagctgtattaatatcaatatgatcactgtggaagtgggaaacaagatagtagtctaattcgttgatggcaaatggatcaatgaccatcggttgcacacgaaggtttggttgtaatttacgcacacctgccatgttagccatttggtggccccaaaccatgtcttttactttcttagttgatttaccgcggtttgaccacaagtccataaccacattggctccaccaggagttttaatccagacaccacagttacccagccaccacatagcaaagttattggcagggacaacttcttcttcaatttcttcgttcagccaagtgccccattctgggaaagtacttaaaatccatgattctcttgtaatatctttaacattagtcattttgtttcctcctatacattggatagttattttttctacatatttataatactgctaccagagcctttacaaaagaccaaataaaacacaagcttgtgttcacatttggactgttcctacctgaacaataagctctaataagaggaaacagaactttaatttaaaaacgggattaataatttatataaataacaacgttagcaaccgtttcaatatagaatatctttaaaaaattttattcctctatgctgctttatttgaatatctattaagaatgatacttgctgcaataacaatgagagtaaaaacaataattgtaacaatcaaagcaattgagccaatctgaccaacttttcctaatataaaacctggaattaaataatcagtatcagcaaaggttgaagctgccatttttaatgaaccaagtaatggcaaaatagcaagcggcaaccaactcaacagaagactattaaaagctgaaccgataacagcacctctgcgtcctcctgttgaattgccataaacacctgctgctgcaccacagaagaaatggccaacaacaccgggaataataactgttgtatgcaaggcaatcatcataaacatggaaagagtaccgacaataaaactagtaaagaagccaatcaaaacggcattaggagcataagagaaaatgattggaacatcaagagctggcttagaatttggtacccattttttagccactccttggaaggctggcacaatttctgctaagactgtacgtacaccttgaagaacaacgacaaatcctgctgtgaaagtacctgcttgaatcagtgcatagacaatggcactagtcccatcactcaaatgcttttcaacatagcttggcccagctgcaagagccaatacaatatagaccatactcattaaaagcatgattgagatggttgagtcacgtaagaaactgaatgattttggcacatttaaatcttctgttgatttagaaccatcaccaacccatttaccaatccaacctgctgctgcatatccaatatttcccgtatgccccatagcaactttgtcattacccgtaatctttttcataaatggttgacaaagagctggggttactgttaataaggttccttcaaacaagccacctaataaaacaattatgacattgcctttaattcctgcactcattaaaataacggcagtaatacaagaaacatacatcatagcttgtcctgttaaaaagagatatttaaatctagtaaatcgagctaacaaaatattaacaatcataccaataaacatgataagtgctgtttgactgccataatctttcaaagccaatgcaacgactgcttcgttactcggcacaactccttgagtgtgaagggcagtctgaaacatatcagcaaatggtgatagagcattttgtaagataccagctcctcctgttaagaccaaaaagccaaccatcgtttttattgttcctgaaacaatatcggaaaatttctttttttgcaagattaagcctattaaggcaatcaaagatactaaaatagcaggctgggtgacaatcgaaacaaataaatttagaatacttttcatttttagattctcctattatcttagttatgagcaattccattagcatccaagattttaagaacattttctgtaatttcttctgcatcaataatcgagttcaaagcgacaattttttcctctggtaaattcgttaaagctggtaccaacgttttttccgcaaagaaataatctgccatatcaccgctgatacttcctgaatcagtatgttcaactgtgaaattttccatgtcaacacctgcatcctgaagtgctgattcaatattcatttgaaccataaagcttgttccaagaccactttgacatattgcaaaaattttcatgattcttctccttcttctagtaatgtgctaatttcgtcaacattggttgagtgaatcagttgttgcaaattttcttttttagatagaattttagttaggctcatgagcgcttctaaatgggcattattatcacttgctgctaaacaaatgaaaacggaaacagggtgttgggggtcttccagtagatgaacaggatgatctaattttaataaagacaaccctttttcaaggacgccctcctctggtctagcatgcggaagagccagatgatctcctatattgataaaaggaccattgtctttgaccttatcaaccatcgcttgaatataacgctcctcaattttctgtttttgtaacaatggctgtgctgccaaacgaatggcttcttcccagttcattttcttagaactaaattggatgtcttgtgttgttagtaagcctccaagcatattcttcctctctttttcactttataagaccttcaatctgacttttagtcccctttagaagagtttccataaaatcactactcattaactttttgataaaagcttgaaaatattccttttcctgagggctagcatctgaatcaatgataagagcaatgatgagctgtacatttttaagctgttccgaccatttcgaaatgacccgattggtacgaagtataataattttatttggaaccccttgttcattaaaatgaggcattattgtcctatcgtaaatttggatattaccgagtttttcacgcttgataaattttgtcactatttctgaaaccatcaagtggttctcctcagctaacttctcagctaaaaaatgatacacatcatcttgactggaaaaatcttgatttagatacagctcaaacaaatcagttttcataagcaagctccccaatagccgtctcaatattctttttatcctctgatgtcatcaatgcgctcactaaaacagttttaatcgcaacattacttgaaagattgacacttgtaatgagcagtttaacatctggatgattggctagaacagcatcagcattatgactggagactacttcaacaatatccaagtttttaaactcagcttcaatcttcaacttcaaaagttctgaaatcccaatgcctgacgagcacatgataatagcttttatgggggggtgattaagttctctaaaacgaacaaaatatagggttaaaaagccaatttcgtcggtactaattgttggaaaaccaaaagtctgaatcattttttgcgaaaccacttcagtctgctgataaatcgtttgatacctttcacaaatctcatttagcattttgtttttgattcgaattttaatgtcaagacgtcgaagtaaagggccgatatgattagccaaatcaataaacataggagattgttcatcaattttttgccactttgtcatttccatctcagtcaagtaaaatttggtgatggcaacaacacgtttagaaaattggactttctgttgttgagaattcaattgaaatcgtgaagaataaagatactgataaaggtaactaatctcaatatcatcaattgttctccctagataatcactaatatctttgataaccttacgactttcgtccaaaagcatggtatcattatcatcattaaaatgcacaagagattgactggctttgcgattttcttttttaagacgttcaatcatgatatagagatgggaaaaaatattaacattataaggataaggcagttctgcattcaaatggctttcaacctttttaatttctttaagaagaaaaagtgctagatcaatatcaaacgttgcagactgtgttgataaagacaagtcatcaatatcaattgtactgaaagcaggaatgagatctgctatagctcgtcgaatatcaagttcagaacctttgataaaaatattccctgactgcgttgaaattttcaaatgaaaagcatcaatttgtttctgaatttcaaccttatctttcataatgactgagttactcacataaaattcctgacctaaatcatagattaataatcctttaggcgatatcaacaaaagtttttctaaaatcttctcttgtcttttgaatggcgtaaaaacattgtcattagtttctggtagttcctctgtcaaaaattctttcttaagcttaaagccacttcctttctttcttgcaataagttcatttggagaataaagttggttgatttctttgattagccgataaattgttttctctgataactgtaattgggttgagagatctttagctgtcataaaatctgaactgccattcaaaattgaaatgagtttttcaaattttaatttttgtttaaccatctttattcccctttatatttgatattataaccgcttttagtatgtcatgaacttctttaattgtccagttcatagtggacatttgtatttttaatagataaaaaacattaacattgtctactaaacatttcagacttaaaaaactgtattcacagaaattattctattgataagataagtgctaacttaggaaaaaagagtggaaaaagttgttcaggtattaacatgaattgaccgttcacgaaataagataagctccaatagtttttcaaactgttggagctatcatttgcagagcaagggatagaagttaggaaaaactcccagtacacttttttgtaccagcctctagtataaaacgtaaccaataccatagcgttggctttttgacgtctctaccacccaagaaaactgtcaatacaagttctaagcctttttatttgcattgtgaacaaagagcgatagcggctcaattttaaaattcacaaaaaaataagtctgggagggcatttcgtctcagatatcatactatatttctatcttttattatcataaagcaattcctcattgattaagccttcaatttttgttttgaggacgtaacaatcactatcattcttaacataatgacgaatataagtttctaactttttatcaaaatcatcctgacctgtttgtccacgctgcttagcaaaacgaattaatttaatggcatcatcatctcttaaaatagaatggacaaaaagagttggcaactgcgtatctagactgtcattagttgaaataaccaaatcaacagccataatatcagcaatactataaaattgttcagatgttaagacagcttcgatcttgccatgaggtaaatattgcttgcactgctgcataaagagtttttgcactccaatgccttcatcacaaactagggtcaagactgcaggcggtgtcggtttcgtctcagaatgtaccaactcaccgccaatgtggatggtgatataagcgatatcatcgtcattcattttaatagaccaagcattttccaaaatagaaagacaaaccttggtcatagcaaataagtctgcatatttatctttaatttggtctgttagcggattatttgaaacgatgccataagccttcctaaaaagaagggctttacaatgcgttaataactgattaagtaagagttgtttatgtttaaaacaaacatggtaatcaagctcaaaagcatctataaaatagcttaaaacacgccgcatatcatcataatcatgactttcaagatgcatatcgcgatcttttcgatacgacaaaagcaaaacagcaattaaagaggtttcgatctcatctaattcaatatgaaattctctttttagattctcatttaaatgcctcgcaatttcatattctttgcgctctttgataggagaaaattcacttaataaatctctttgttcacgttctgataaacctaggttctgataacttaacagctgataaggtaaagtagcaaccataaaacggatatcttgactgttgatttttttaccgagtaatgcttgggaaacctgcaattctcctcttataaaacttgaaatatcatcagaaaaataactagacaaatcagcaaaatctctcagcttatcacgcatgatagctataaaattagggttactatctgtataaatagtatgaagcagcttatttaaatattgaattttagacagaggatggcagtccaaataatagccttttgatttggttgcctgaagcttaatactatatggttcaaaagaaagacgttgacgcagttcattgaggtcattgagaatggtattacgggaaactgcattgatttgcatcaacttttcaatcgtaacacgatctttagcaattgcaatataagttatgctaagcagcatacgttcttgtatactcattacataagaataatcatctaaatctactagcaaagtgcggcaggctgctttttgttgtgatgaaagcaaaatacctatgcgaggatagctaatgattttcggaatctcagatggcagcgcttcatttattttatcaagatggtaataaactttacgtctggactgattcaaaaccttagaaatgctcatcactgtttcaggctcttctaactttatcaaataagaaagaaggtcataactatttctatccaagataatcattttttgcctcccttgttatcgatttcattattttcattatagcacacttttaaagcgagacttactttatcatccagataaaaaatcggcctcttatacgatttcttttaataggaacagcgattttttaccataagaaacttgcattcgagagcaatctatgagctgctttatgttacggaacttttaacaactgtagctagcaaaaaagaagaccagtttggtcttctcagacattagctattcatcaccttttagggctaacaaaaacttaaaagttcaaaagtctttagcgttatagctgatttcaaactattctagcaaagattgctgctgatatatagaatatctaattatccattttatgcagtaatttatctttgaaataatcaaaataagtctttttatcaatgacagtgactgtcttgcctgtcataccatacttgatgagtttgctatttttcttagaaacctttactttggcagtaaccttaaagagatttccttttttagtagtagttgctgatgaagcgacattgttaatttttccttcaataacaaccttgtcatttccctttttttccaaggaaagacgagcggtttgcccctttttcatagaaacaacatcatcagaagaagcataataggtgattaacacttttcttgttttttgaatatcaggatagatttgagcaatctcggtttgcttcggaataatattggcaccatcatatttgggattggtatgaataataccatcttctgaagcaaaaatcgaaaccttttttgtctcattttcatcgtcagagctgctttccttgtctttcgatttctttttcttatctttggaagctttcttgctcttagacttcttctttttcttgctctttcggtgttttttcttttccttctcttctcgtttttgtctttcttttataatattcttttgttcagtctgacggtttggactggcattttctgaatattcaattaaaacgtctcccttctcaacagctgcattattatctaaattatttttaatgattgaactgtcactgtaagattggataacatctacaacctttgttggtgcaacttcaccagtagaaatcactgtaatttcttttttagcaaaacaaaggaatatgaccaagaagataatcaagcagaccaaaggaacaattaataatgtcgcaaaattatgatagcgtctcctataaaattctgcactttgtaaaaatttaggatccatgttatcccctttctcaattaaacaggttataatagaaaccttgcttagctaaaagttccttatgagtgccttgttcaacaatttttccttgatccatgacaatgacttcgtcagtacgctgtgaaatgcttaagcggtgagcaacaaaaattattgttttctccgtcatctgtaagagattgctgataattttcttttctgtcaaaatatcaagactgctggtggcttcatccagaatcaaaaccggtgcctgtgttaataaggccctagctaaagcaatccgctgtttttgaccgccagaaataccggcaccatctgataactctgtctgatagccctgaggcatttgttcaatgtccgagcggatttcagcaatttcacaagcacgaataatgtcttcctgactcgttccttctttagctcctaaaacgagattatccataatagagccactaaaaacataggcctgttgcggcaaatagctaatatgccgccgcaaagctgtcttatcaataacttttaaatcattgccattgattcgaacaatccccttgttaggctcgtagaaattgacaatcagtttagccaaagttgtcttaccagaaccactggctccaactagactgaccttggagccttttttgattgataaattaatatctgataaggtatctcgcccaaatccatatttataagaaagattttcaaacgaaatatcaccatctaaaaagctattttctgataaatcgccgtctttttcaaattcagattcgacaagatagacctcattaaggcgtgtattggcaacgcgagctgactgcagtttggattgcagattgataatattttcaattggatttgagaaataagacagcaaagcattaaaggtgataagctgaccaactgagattttattatccataactagacgagagccataccagagaatgacaacattgaggataagcttagcaccgctttttaatgcggtttgaatggcactatacttgtgtagcttaaagtttttctccaaataatcaacaaattcactatcaatgttttgataacgagcggactcacttgtgagtgatttaatggtttccatcccattgatatcttcaatgatagaagaacttaccacagcattgctttccatcacttcatgattcattttctcaaaaggctttaagaaagcaaaaataatgatggcataaatcggaatagagagcaaggttagaaagaaaaggttattgttttgcgccaataaaactccgccaaccaaaattaccatagtcatatctaaaaagattgaaaagatggttgatgctacagcatcaataatctgattggcatctgtaaaacgagacgtgatttctcctgttcgccttgtcgcaaagaaagacataggaagcgtaaaaatatgtttgatataagacaggataacatcaatgactaaacgcaaactgagtacggccaagaggtattcttttgcaaaagccatgacctgctggataatataggttattatcagaccaatcgtaatcattcctaaagttgaaatcagctgatcaggaatgtactcgtccaatattccttggagatagtatgatccgacaatatcaatgagcgtcacaatcaagctagctatgataatataagtcatcaaagctttctgcttaaagatcaacgggaagaaattagacaaaccatttttttcacctttatgaggcttatagttaggctgaggagctaggaaaattgcaaggcctgtccactctgattgaaagcgttccttactcatcctagtcaccttaactgaaggatcaggatctccaataatcagctgattattctggctgccatagacgacataataatgctgcagacgttttcctttaatcacatggacgataaaaggataggtcaaatcattataatcaaaaagcgtcatatccgccttgatagagcgtgtttcaaagcctaactttttagcagcttcaacaatgccaagagctgttgttccctgcttgttagtctttgagagttcccgcagataagcgatagagtagttagatccgtaatgctttgcaacagatgccagcactgccggcccacagtctctggtatcaatctgaggtactagcttataatgtctgcgccaaaacaacttagactgcccatctggtaaaggattagatgacgaaactgtccctcccctttttgttactcttttgataacctctaagagaatgttaacggctatgacgattaaaacaacataaataacttgtttcataaaaataatctttcttagtttatattcagaaaaataactcaaactaggttgagttattttaaatagagtgagttgatcatctcaactctttaagagattttaacatttttaatgtttaaccttttttaatagttttgcgccatcaatcataatgagagaatccttctaatgtcattgaatccaaagttaacatattcataaacttctccttctctaattctctaaacatcatcattttaacattttaaaacagcatatacaataatattccagaactttaatacagatgataataaaaagaaagaatcttacaacttttctgatagttattatttgttagcattccaaaatgatctgacccaagctagatttgagtacttaagtaaagtgagtcgatcatctcaactctttaagagattttaacatttttaatgtttaaccctttttaatagttttgcgccatcaacacaatgagaaaaagtccttctaaggccattaacccaacaagaatgtacttaaggggtcttatcggtgtgtatacagccagtaaccccattattacaaaaatcggcaataaactattctgaaatagacgtttaatcataggctataaccagctcctatagtttcagtgaggagataattaaaatttttattgttttttcccttcaacttttattatgctaaaaaagctgaagatgctcacagctgtgatagcaataaataccaatgttgctataatttttgaataacaccatataatgacagcagtgactatcgcaaatagaaaccaagacagcaaataaattatctttcgtgttcgattcgccatcatattgctgtcaactgaatcatttactttggggtcgctttcattattcttctcttgagcttttgtcatactaaaaaaactgaaaacagccataactgtaattatagtaaatagtaatattgctatgatttttgaatgcgaccactcaaccaaagcaaggcccgtggctaacaaaagccaagacagtaaaaaaattattcttcgtgttttttcatcttttattatcatattggtgtattccaatcattaacattaattagcgccataataaataactgcagcacctgcacaaacttcagcacctagatataagacagcaccgacaggagtagtgcatgctaatcctccaagggctgcagttcccatagcaagataagaagcagcaacccctttcacatcgaatcctccctcaatactagcaagatgattcatatctatttcatcaaaattctcgaatgccattgtgtccatcacctatcgctcccatcggacatcaacttatcaatcatgagagtcatccagaatttcataaacagttaatcagttatactagagtgtcacctaatttacaatcagtttttattaaaaaataacaaatataaaccataaaatgttatggcaatacactctaatacaaaggctccaaaagaaatcaacctaatgatggtgcctttactgcaagcagcaattaacggacatattatgcagctaatcataaaaagacgacttaagatattccacattttattactaccatccatttttccagccttcagctatccctgtaccaagccacctacggcacctgcaatagtcccaactccaattagccaaggggctgggggctgcttctgctgccataggaggagaaacttgcgccaatgcaatgcttgctccgaggccagctccaaagccagaaatgccacccactacagttgacaaggagccaaatacattcaaacagaaaaataataaaacaagggagcttatcaaatgaacttttactatagtgtaatataagcggcagtatcataaaaccatcatataaccaataatttgaacttttattgattaagaataaaattaataaattgtataatagtttcatcttttagaactaggctactaaactagcaccacaagttattaacttgactaaatttaaatttgaaaatacttttgctttcactaatgcaaaagataataagcaaataaagcaagcaaaatgatgacacatataaatgaaataataatgtttttactacggtaagaaataagtgctaatacacaaagagcaagtaacactaaaattgactgaattatgtgcataagctaatattaccttttctaaatttgtgctgatattttaatgaattcaataacataccttatacctagaatagactaacattcgtattccaaaagaaaatactattgaaattattaaagttaactctacacctactttaataagtatagtaccaattgaagtcatacaactgatttccaatatatagaaatgattcaaatagataactagaagctgttaattaccagaagcctccatctccccatccttctctagcaccaatataaacacctgctactgtagtcaagtcgagagtcccaagagctagatacggtcctgcaactggaactctccacaaaaattgagctggcttgaaaccggctgtgaaccctgttccagctcctaaaactccaccagcaattgatccaacaaaacctgagccatcaatatctacaaggtaatcttctcctgctgtttcaaaatgatcaaatgccattgaatctaaagttactgcattcataaaacttctcatcttcttaagattgctgtcattttaacactttaaaatgacaagttcaataatattttgatttttaactttgaatagaaaaaaagtaaaagtgaatatagattttctgataattattatttcattagtatttcaaaatattgtctatcctatatttaaagagaaatatgattgaaatcattaatataaaaggtacactatctaaaagattcatgtaagaacatgaaatcatccttttttatttttccaataatctcttagcagttgcatcagtttgaaaaaatctttccagcaaaaaatgataactaacatcgttcctattagatatatagtggaaacaaaatctcttatacttggaaagatggcatacagcataagacaaataggtatagccagcatataagtataactaacaatgatagatttctttgaaaacataaaattttcctttcaattatgagaaataaaatgactgtaactaaaatggaagtttctcataatcagtaacagcaccggtgaatcctccaccaacggctccacatactccaccaaaggttgcacctatagctaaaccagcaagataagcaacaggaactcaacaggaactgcctctgaacctgctaaggagccgacaatttattttcgatttctattcacatatttttactcaaatagcctaattcttataagaattaggctattgattcattttaacagtctctctcatattacttatgagagatgtttacttttccaataaaatattaatactaaaatattctctatcataaatatcatgaatacaatcagtttaatatttttaattggtaataataaggaaatgagcaataagataggataactaaagagaacagctcttcctaatttcggtgacaacatatggtagtcctcctgataaagcttaaatccaaggtccccaagtattaacaccagcacccgcaatagtcccaactccaattagccaaagggctgcttctgctgccataggaggagaaactcgcgccaatgcaatgcttgctcctatgccgaccataatagatatagttgcgtatgttttactcactcgtaaaggcttagatttgcttacacaccttcaaacatttttaatgtttaaccctttttaatagttttgcgccatcaatcataatgaaagaaagtccttctaaggccattaaaccaacaagaatgtacttaaggggtcttatcgatgtgtatacagccagtaatcccattattacaaaaactggaagcaaactattctgaaatatgcgtttaatcataaactataaccagctgcaaaaccagctcctccatatataagatcttggacaactccatcaactaaggcaccaattattgtaccatatccaggctctattgcagttcctactccagctccttggacaactccatgggcaaaaccacctgcaaaaccaacaagcccaagacagataccaagacctagtccttctccttcgatttcagtaaggtaatcttctcctgctgtttcaaaatgatcaaatgccattgaatctaaagttactgtgtttataaaacttctcttcttcttaatattgctgtcattttaacacgttaaaatgacaggtgcaataatatttcaaaattttaatatctgtgacatccggttgaaaagtataggaaatttttctgttaaattagaattgcttaatagtgaccgtcgtttttgtaaaatcttgactaacattaataagaggaacatattttttataaatgaagcctttatcttttataattgtgtttctccatgctttctaaaattcttttcactttattaatctgacacagatttattcacaaaaaaggaaaagggtgttttgttcattgatctctctgaaagtaaaaaagacaaacctcgaaaagtttgtcttcaatctgaaacaatcattcatctttttcttaatgactatcgtctttttgcccatagtaagcattctttccatgcttacggagataatgtttatctttgagtgcttgcggtacctcttccacttctggattgatactttctgtgtatctcgccatgcgagctgcttcttccaagacaactgcattgtatacagctgatttttcgtcttttccccaagcaaatggtccgtgattgcggacagtgacaccagaaacatctaaagggtcaagaccgcgttttttaaattcttcaatgataacttttccggtttctttttcatattcaccattgatttcttccggagtcaaagcacgcgcacatggaattgccccgtagaaggtatctgcatgtgttgttccgtaacaaggaatatcacggccggcctgtgcccaagacacgccttccgttgagtgtgtatggacaataccgccaacttccgggaaagctttgtacaattcgacatgcgttggcaaatctgatgaaggattcaagtctccttcaaggatatttccatcaagatctgtaatgaccatattttccgccgataatttgtcataagcaactccagatggtttaatggcaatatagccaccttcgcggtcaatagctgagacatttccccaagtaaacttaaccagaccatgttctggcagttccatattagctttgtagacgcgttcgcgcagttcaggtactaacatatttagcgtaaccccgctttctcaattaaaggatagaggaaatcttgtgcttctttaatggctgcacgcgtttcttctaccgtttcacaattttcagaccacatttcaattaaaaatgggccattataatttgttttcttcaaaacatcaaacatggcttcccaatctacacagccctgaccaaatggcacatcacgaaattgaccttttgaactttctgtgacggcataagtatcttttaagtgaagggctgcgatagatttgtgcccaatgtagaattcactccaaagatcattgccccaagctgagacatttcctgcatcaggataaacaaagaggtaaggagagtcaatttctttttcgacagctagatatttttcaatcgaattgatgaaaggatcatccatgatttcaattgataagataacttgcgcttcttcagcccaagtacaggcctgacgtaaatttttaaggaagcgtgcacgtgttttaggagacttctcttcgtagtaaacatcgtagccagccagctggatattacgaataccaatgtcctgtgcaaactcgatacatttttccatcatttcaagagcacgcgcttctttttcagaatcgttggatcccagtggataacggcgatgtccgctaaaagtaatggtgggaatccgcacacctgtctcaaaaatagctttaaccaattctagacgttctttcttggaccaatccaaacgtgccaaacgttcgtcgctctcatcaatggacaactcgacaaaatcaaaaccaagttccttggcaaagttgaggcgttccaaccaagtaaagtgtttaggtgttgccttttcataaataccaattggacgtgccataagctctacccccagatccgtttgatttcgtctttaaatgcacgtgctgccccagcaggatttttcgcctcagtgatcccacgtcctgcgataaaggtgaaaacatcaactccttcaaagagtttcaaggtgtcaacactaagaccaccggttactgaaacacgaaaacccatttcaataagttttttaaccttgttaaggtctttttctccccaagtttcacctgcaagcagagcatcgcgtgattggtgatagatcgcttgtgaaataccggcatctaaccactgttgagcctgatcataggtccaatcaccatagagttcaacctgaatctcacctttatcaggattaatgtcttcaatagctttacgggctgctttcatggttggaatagtagctgaacagatacaggtcatccagtcagcgccacgcacagcattatttttagcaactgtaccgccagcatcagcacactttgtatcggcaacgatgattttatctggaaaaagactgcgtaagacttctaccaattcgctgccaacttgaaggagacagacagttcctgcttctataacatctacttcatttcctacagaaaccgctgctgtaatagcgcctttcaagttagaatggtccagtgcaacctgtaaatttggcaattgttttgtcatttatatctccttctttctacgtactaactcatttcttctcatgaatcaaggtcaagcccctcaagatagggactgcttttagattcttctaccatagcaagcacttcttctggcgttttgcaattaacaaggcgttcaatggaatgatctaattcaaaaagtgcaatgatttggggaatagctactgatgtatgaatttttgaactagtcgctgcaagagcaaggagaacttgaacttctttgccatctgtaaaggtaacgggctctgtcaatgtcactaatgaaaaggcatcgcgctgtacgcctgcttctggacgagcatgaggcatagccatacccggcattaagatataataaggtccataactttcagttgactcaataatagcattatagtattcaggttttactgcaccgctttcaataagaggggtgacagacagtttaacagcttctttccaatctttggctgttaaccctaatcggattgaatgattttctttaaaggcttgtgctaagttcatcgtatccttcctttcttaaaaactataggtgccttcagcaaaattgaagacacccactacgctttttatttcaatgcttcttccaattttgtcttaatttcattatcatccattaaattatcaagaccaattaatttaccattcgtacggccgtccaattcatgaatgaggtggttcgaagcgacaacaatatcataatttgaagctaaacctttggcttcgccaactgaacatgatgttgattcaatatccgatacacctaattggcgcaaagcattttcaaccttcattttaataaccattgatgagcccatgccatttccgcatgctgtaagaactttaaccataatttttcctcctataaatgatcgtgcctattataacacaatgataggctaaattcatattagctgattattctgcttgagcatctccacgatagtaggcttccttatcttttgctttagcaaattgaatttgcgggatagcaagtaagaagactgccacaagagcataaccgataactcctgcatatttgaaaagataagcaaatgggacccatggaatttcaaagtcaatgttgccatgataaccgccaaatcctgccagacctagaagagcaactgcaactgcaccaagtgccacttgaagcacacctgataagaatgacagaacaactgctgctttccaacctccgcgtttgtcggcataaacagcaatcgcagcattatcaaagaacactggaacgaaacctgtgataatcaagactggattcttaaagacaatcaataacacgattgtaattaactgtccaataagtccagttgcaaaaccaaagaggactgcactaggtgatccaaaaccataagacgccgcaacgtcaactgctgggaaagaaccagggagaagtttgttagagataccttggaaggcattggtcagttcaccgacaaacatccgcacaccttgcatcaagacaaaaagataaacagaaaaagtaaaggccgtttgaacaacgtacataaagaaggcttgtttggttggatcaaacaaggtacccgttgtaatcacctttggattagacatgatatccggaccaaggatagccaagatagcaccaaagaagacgagcatcaaggttgctgaggcaacaactgtatcatggaagatatttaagaaagctggcaatttcaagttgtccaaattttcttcttttttaccaagttttggagcaatcttatccgtaaaccaaatagcaaattgctgttggtgtccgatagcaaaaccaccgccgccagttaagcgctgtgttggctcaacagtcatattagaactaaccgcccaataaagaccacagatgatccctacagctaaagttccccagaactgattgcgaaaagctggaattaaaaggataaccatcaaggtaactgtcgcagcttgttgtaccatgatgtgacctgtaatgaacaaggtacgaatcttagtaatcttacgaagggcaaccagaagaatattgaagaagaagccaatcaagagcgctgttgttgctgtaccaataaatctagggaactcttgagcaatcttttcatttgctgctgtcagcccaaaatatgggtcaataaccgccgcaccaattttgaatttataattaagtgctgctaaaatgggacgaaaggttgtcactagaccgccagcaccaacatccagaatcatatatccaacagttgccttaatgaaaccagcaaatacatcgtgtaatggttttttgaggagcaagtatccaattaatactaagatacctacaaaaaaggccggtttttgcaaaatattttgcgagaaccaagttagaatattaataagaatattcatatgttttcctcttttctaaaaagatttgaagtttttttatagttttattataattcttgaaaatgctaacaacaagaccaataatcacacatacaagtgttcacaattggactataattttctgctttttaaatgagtcgaaatttagaaggcattcttaatttttatccaattaaattttaaacattaaaagaaggcttcttggaattcagcatagaaggcaagtttaaaaatgaattttatttgcagttatacaaatggttaaaatcgtaccaaatgaaaaagaagtcacacaagcaacttcttttttatagcataaaaattattaactttacaatccccagacactttccaaaatattagtctgatcacgatctggaccaaccgagaaagtagaaatacgaacaccaactaattcacttacacggcggacataattacgagcattttcaggaagatcttctaaactgcgaacccctgtaatatcttcagaccagcccggcaattcttcataaataggtttacagcgtttgagttgttcgagactggcagggtagtgatcaatccgttttccatccaaatcataggctacacagatttttacgatatcaagacctgaaagtacatcaatacagttaagagataaattggtaatgcctgatacacggcggctgtgacgcataacaactgagtcaaaccaaccaactcggcgcggacgccctgttgttgtcccgtattcatgcccaacttcacgaatgcgctctcccgtttggtcaaaaagttctgtggggaaaggaccatcacctacacggctggtataggctttgcagacaccaacaaccttattgattttacttggtccaacaccagatccgatggtaacgccacctgcaactggatttgatgaagttacaaatggataggttccttggtcaatatcaagcataactccttgagctccttcaaagagaacccgtctccctttatcaagagccttatttaggataacagaggtatcagtgacataatctttaatcttttgaccataagcatagtactcatcaaaaatagtatcaaaggctactggagacgactcatacattttttcaaaaaggcgatttttttctgccaaatttgcttttagacgttctgcaaaaatgtccttatcaagcaagtcagcaatccgaataccaacgcgtgcagccttatccatataggcagggccgattcctttattagtagtcccgattttattatcccccttggacgcttcttgtaattggtcaagtttaatatgataaggcaaaataatatgggcacgatcagaaatacgaagattatctgttgcaacaccttcttgatgaagataatctaattcttcaaccaatgatttgggattgacaaccatcccattaccaataacagaaaccttttcaggaaagaaaattcctgacggaattaaatgcagttttaattttttcccatcaataacaatggtatgccctgcattgtctccgccctgataacgtgcaatcacttctgcatcagcagataaaaaatcggtaatttttcctttaccttcatctccccactgggttccaacaacaacaactgaagtcataattcttgatactgagctgtcaataaacagctccacatcctttctcaatagacatggcaggagtttcacccgcaagaatatcttacttataaagtatatgaaatttccgactatttttcaagaaacgtagcaaagaattgtcagaaggagggaatttattgtacactattactatctacaatgaagcgaggcagcctatgcacatcaatcaattattacagcatgcaaattctgacttaccccttcttcaagctaattttggtttagaaagagaaagtctccgtatcaataaaacagaccaccggctagctcagacacctcatccaacagtactgggttctcgccagtttcatccttatattcaaacagattacagtgagtctcagatggaactaatcacgcctgtcgctcattccagcaaggaagtccttcgttttttaggggctattactgatgttgcagagcgcagtattgaccaaaaccaatacctttggcctttgtctatgccacctcaaattacaaaagacgaaattgaaattgcccagttagaagatgactttgaattttcctatcgtcagtatttagataaaaaatatggaaaaatcctgcaatccatatctggcattcattataacatggagctaggtgctgatttaatgaatgaactttttgaacttagcggttatcagtctttcattgactttaaaaatgacctctacttaaaagtggctcagaatttcttaaactatcgttggttcctgacctacctttatggggctagtcccttggctgaaaaaggatttttaaatgaagagctcagccaaactgttcgctcaatccgaaacagtcatttaggctatgtcaatactgatgatattaaggttcctttcgacagtctcgaaaattatatctcaagtattgagcattatgttaaaagcggtgctctatcagctgaaaaagaattctattcagctgttcgtttgcgtggcagtaagcataatcgtgactatcttactaaaggaatcacttatttagaatttcgctgttttgatcttaatcccttcaacaatcgcggcattacgcaagaaaccattgacagtgtccatctctttatcttggccatgctctggcttgacacaccaaaaaagctgaatcaagcacttgataaggctcaaaaacttaatgataaaattgcattaagccatcctctggaaaaattaccaaaggagaactctgcttcccttattatagaagcaatggaagccttaattaaacactttaaattaccaagttactatgatgatttactaattgctatcaaaaaacaagttgaaaatcctaagttaactctaagcggccgtctctttgagcatattaagcatgcctcattggagcattttggacagaaaaaagggcaagattatcataactacgcttggcaagattattatgccctcaagggctatgaaaacatggaattgtcaacacaaatgctgctttttgataccatccaaaaaggaattcattttgaaattttagatgaaaatgatcaatttctcaaactgtggcataatgaccatattgaatatgtcaaaaatggcaacatgacttctaaagataactacgttatccccctagccatggccaataaagtggtgactaaaaaaatactaagagaaaacggctaccctgtcccagcaggagctgaatttgacaataaagacgaggccctccgctattattcccaaatcaaaaataaacctattgttgttaaacctaagacaaccaatttcggacttgggatttctatttttgaaacagcagccagtcacaatgattacgaaaaagcacttgacattgcctttattgaagactattcggtccttgtggaagaatttataccaggaacagaataccgtttcttcattctggacggtaaatgtgaggccgttctcttgcgggttgcggccaatgtcgttggagacggccatagtactgttcggcagctcgtggcacaaaaaaatagggattctcttcgcggccgggagcatcgctctccacttgaaatcattgatctcggtgatattgaattgctgatgctgcagcaagaaggttataccccagaagacatcttaccaaagggcaagaaggtgaatcttcgtggtaattccaatatctcaactggcggcgattcgattgatgtgacagaaaccatggatcctagctacaaacaactagcagctaatatggcgacagcaatgggagcttgggtttgtggggtggatttgatcattccagataccaacttaaaagccagcaagggaaagccaaactgtacctgcattgagctcaatttcaatccatccatgtatatgcatacctattgctaccaaggaccgggacaagttatcacaggcaaaattctagccaagctctttcctgaaataagcaccaagatataattattattgcataggcttcctttcatttttacactgtaagaggctggaacagatacgcatgattgctgtcccagcctcatttttttatttttcatccaaatgtaaacttacatttgggtggattttttaaatgatggtcaaatgtaaacttacatttaggcgaaattttttaataacggtcaaatgtaaacttacatttagctgattttttgataataccaaatgtaatattcaaagatttccctgattccattaattctgagactagtatattaaagagtgagacagatagcaagattgctgcgcaattatcatttgaagaataaagcaaaagaggagtaagactagaactaacaaagccagttccagtcttactcccaaccactgcatcaaactattttataaaagactcgttcgaaaacctatttcccatctacttgattgacttcttttttgtcagttagtcttcaatggtcgacaggccagaatagtttgtttccaaacatcatcttaattagccgtaatttgtgtgccacttccttctgaaataacatttgctatattttctaaagaagtaataatggcttttccactgggatgtgcttcaacaaaggcaattgctgcttctacttttggtagcatgctacctgctgcaaattgttgttgatccttccatgcttttagctgacttgctgttactttttctaatttttcttgattaggttgaccataatgaatataaacatgatcaacaccagtcaaaataataaataaatcagctttgattttttcggccaataattgactggcaaaatctttatcaataacagcttccacacccattaattcttttgttttagggtcttcaataaccggaatgccaccgccacctgctgtaataacaacagctcctgtattaagcaaagattttatcgttgctatttcctgaatggcaattggcttgggagaagcaactacttttcgccaacctctgcctgcatctactttataagtagcaccagtcatcttttcttgcagataggcttcttcctcactaagaaaaggaccgatgggtttactgggatggtcaaaagcgggatcttcagctgatacaagtacttctgttaccatagacacaacttccttatcaatggattgtttccttaactcattgattaaggcattttgtaaccaataactaatggaaccttctgtcatggccactagggtatccaagggaagcgctggattgtcataagaatcagcagctgtttgttgcaataacagattacctacctgcggaccattcccatgagtaatgactaaatcatcaccatttttaatgaattggaccagatatttggcagtctgagccaatgctgcctgctgtgctttggcagaagcatctctagacaaaattgcatttccccctaatgcaatgacaatttttctttttgccatacattttctccattttcactgattaattagtttaagttgcaggttgctgttgtgtaatacagtgaatattgccaccaccgtaagcaatttcttctgttctcacaccaacgacttttctatctggaaacatttcctgtacctgctgtttagctagttgatcattttcatccccatactgcggtaaaataatccctccattaacaatcaagaaattcaaataagaggcaatcgccatttctccttcttcacgtggaatactgccttcaacatagtcaatggttgcagcttcctgcagataacagggttccttggtcacgcacattttatgaacctttaaaggacgtcccttggcatctgtctgttgagacaagaagtcataagctgctttagcttcctgataaaaaggatgttccttatcatctgtatagatgcaggcaacttcccccggacgaataaagcaggcaacatcatcaatatgaccattcgtttcataaggatcaatgccatccttgacccaaagaacctttacacaattaagatagtccttcaatttatcttcaatatcttctttggtcagatgcggattacgactaggatgtaacagacacatttctgttaccaaaacggttccttcgccatccacatggatagaacctccttcaagaacaaaatctttcgttttgtaagaatccacaccttctatttcacaaaccttacgtgctactaaagcatcttggtcccaaggaaaataaagaccatcgactaagcctccccaggcattgaattcccaatcaaccgcacgcaaatctcctttgtcattcaccagaaatgttggaccacagtcacgaatccaagcatcatcattggtcatttcaataattcgaatattatgactacccaattctgatacgcgagccaaagcattttcatattgcagtggcggaacacaaagagagacaggctcgaactcactaatagcctcagctacttctaaaaaagccttttgagcaggtttagctcccaaccgccaattatcattgcgccaaggccaaagcatccaaatttgtttttgtttttcaaattcacctggcattctaaagccatcttgttttggagttgtatttttaatacgttttgccattttcttacctcatttctttatttttttgatgataataataagttcacctatccctataaaaataagagaaccaattgttattggtaattttgaagctaaagtttcagaatcaaaagccagtggtagagcagtaaaaatcaaggaaatgataattaaaatcattggtaaaataacaagtaatctcaaaaaactatcattgccactaaccttaaaaggacgcggtgtatccggatctatttttctcaacttgaaaaatgctggaaatacaggaacataagacaataaaaacatgactaagtttaaggagaagaaagcccagaataaatcttgattgggcaaaaatggggcaataacaaccacaatgctagcaacaataccattagcaagagcagcaccaattggcatatctcttttgcgacttcttttagcaaaaaattggggcatgtctccattttctgcagcataagaagctgtattattaacaccgagagaccaagaaatcatattgccaaacaaggtcaataaaaatagaaaagccatggtcatgataaaccaaccgcccgttgagcctgttaataatttaaaactatccatcataccactgctggttgaaatcttatccgttggaattgagacgccaataccaaaagcagaaaaaatatagatagctgcaattaccagacctgcaacaataatagattgaggaatttgctttttaggattttccatatctcctgcaaaagtacaaataacctcaaaaccgagcaggttaaaaataataactgaaatataagagagactgttcagattaaaagaaggcaacagtgactttaaggtcatttcatttgccatgcccttggtcagggccacataaaggcccaagccaccaacaagtaaggccaataacattttaatgacagctgcaccatttaaaatccaaatactatcactcacgggataaaaactaatccaaataaccagccaaataaaaatgagttcaacaataatagctgtaacagttgaaaagttgtgtccagtaactgttgttaataaacccggtgtcataactgccagagaagctagccagagtggaaaattaatccaataataccaagccactcgagagccccatttatgaccaaaagccttggtcacccaatcatagataccaccatcaccaatataagttgttcccaattcagatgaaatcaaaccataaggtagaagaaaggcaattaataaaaagagccaccaaaagaattgagaattcccaatagcagctaccggagcagccgcttcagcaacaaagacgacacaaataacagaaagtactgcactaaataaactaaattttttctttccttccataggtatcttcctttcttttaaatagggaagttaggagtttaggacagacatgattgcgtatcaagcatggtagtctgtcccattctcacataattacctattccggcttcaaaaaagtttctaattcttccttagccttttcctgcttcactaaatcataaggattcttttccctataatcccttaaaagataaacgagcaatcctctaatggaagtcaaacgattttctgcttcgtcaaagcaaatagaatgaggaccgtccatcacttcatctgtaatctcttcaccacgagttgctggcaagcaatgcatgaatttgcagtccgcaccagctttagccatcatttgactatcgacttgatatttagggaagaaaatttgcatccgttcttcctcagataattctgcttcgtatagaccataccaaacatctgtataaaggaaatcagcaccttcaatggcatcttcattatcagttacagtgtattttccaccagatcgttcacaaattttatctaacttttccttatgcatgtcgtttaattgaaatcctttaggtccaaagtgaacaaattccattcccattttagtcgttattagagcaagagaaaaacaaacctgtgtcgcatctccaacaaagacaactttgcaatcttctaactttttaccagctggcaaatgttctatcattgtacagagatctccaagttcctgagttggatgattataatcagacatcccgttaataactggaatagaagcacatctagccaagtctactacactttggtgacgttcaacacgggccattaagatatcatccaatcgggaaagaacagttgacgtatcctcaatcgtttcatgacctccaagctgaatttgtcccggtgctaaatattgtgcatgacctccaagttggctcatggctgtttcaaaggaaacacgtgttcgtgttgaggtttgttgaaaaatcatccctaaacttttgtgttccaataaggggggatagtagccatttttgatacaggccttgatttttaaagataaatctatcaattttagcaattcttctttagaaaaatcctctgtcgtaatataatctgtttttttcatcatagaagcctcctctatttttttcatttccatcatatttttttaaagggcagtttactataaactttgagctgtaaacgattacaaacaaaggtttagctaactaaaccttatgaaataaaccgtttttaaaaaataaacccaaggtttaggccttttttacaaagccttttcaataaaagtttatttgaatgatataattactatagatattaaagagaaattaaaggagggttcttccatgaaaattgaactcatctatatctataatctattattaatgatgctttatgccattaccatggccttttctgtaagcttctttataagagaaaaaaataaaaaaaagaagacactttacttagtcacttctctttatctgctcttttttatcttagataattctgttatttcaatgactgaaattatttcaagttttgcttccaattacaacagttcctttcaaggaacttctttcattaaaacaactgtttttctcgttaacaacttttgtcagttatggattgttcattatttaagtaaacggaaaatgccttggtgggaatacctcatcttactagctatttttctctttatgctcttaccatcactaccatcactgcccaatacagctacaaaggtatacctctattacctaccaaatcaattgcttctgttttatacaggcttgatagcctttttcaatagtaagaaggaaaatgtaagcaagttaggtaaaaaatatttaaaattaatcgctttgctagctatgattgccagtgttgctattttaattgaggacacttttgttattttcactgttgatcaatacagtatttttaatacaaaaattatgaatcgaaatgtttcagaagatctcttttccatcattgcctgctggcttcttctttattattttttaaaagattatcctctcttggaaaaaagaaaccaagctttacaaacaaaggctttatctaaagatgctattcaagacttttttgactattaccacttgacagaacgagaacaagacatttgccaacttttgctggaacataaacaaaatcaagagattgctaaggaactttacctctctgttggcacagtaaaaactcacattcacaatatttatatcaagatggccatcaataaacgagaacaattcttttccttgtacaaagactattttgcagaacacccgtaaattggaaatattcctaaactgacaagataaaatatcctctgcttcttttgacattagacttgttggagaagttattcttatttattgattgacttcttttttgccagttagctttcggtggatagcatcgtcattaaaattgtgtgcaagaaaaaatacctctttcaaggcattttcgtcttatcttattacttgttaaaataaaattttcaatgactagtcaccaaatactttgaaacgttcttggtctgccatgaattctttctcaccagcaggtgcttcaattgaaccaaaaggtatttgtgcacgcattttccagttagttggtaaatcatatttttcagcaacttgagcatcaacaagcggattgtagtgctgaacactcataccaatattttgttcagctagtgctaaccaaatagcataaagagcaataccgtgtgcttgttcagaccaaggctggaaattctctgcataaagcggaaagttttcttctaaatttctgacaacagcttgatcttcaaatagcagaatggttccaactccagcagcaaaactttccaacttcgcttttgtccctgcaaaggcttctgctggtgtgactttttctaattcactgtaagcaattttattccaaaaatcttgagagtcttgcccgaaaagaacgagagcacggctggtttgcgaattaaaagctgacggcgcttgcttaatggcattttgaattaatgcaactaattcagcctttgataaatcaacagttttgcctaaggcatagatactgcgacgttgtttttgtaaatctaaaaaatttgacataaataattacctccattgtcattatgctaatataataacattactactaattagtgacaaatattttgtttattttattaaaaattctaaaataaatgaaacaaatagtagggatgatttccaaaaggtttcatactcaataaaaaacaaaaaataaactagacaaattatgagcacgttttatcttattattaacatttacaaagaaacaaaaagcagacgccaataactttcactaaaccacatataatgatttctcttatgcattatctcaaaagtcaacaataaacgattttatttatgagataatgctagcttagtaaaaaagagtgaaccgacaaaatcgaaatcgcaattcattacaattaccgattttggctcactcttcatataagaataatttctgctgtagtaaaaagaatattgacaggttccttaaccactcaaaaaagttgtcaaaaaagttaggaatacaaattctaaaagttacgataccatcaaacataaaaaacaaatgattattaggattaaaatggtctgatattaaatatcacttaaaaacaagaaaacacgctgtatcaaatgaattaattcagctatttcaaaaatgagattttgtcattagtacagttaaaataggactttcagctcagctttattttttcttataggcttttgcctcttcttctgttgctaaaacaaaatgccccggtgtaatttctctcatttcccgttcctgcccatctaactcatcaactgggtcataaactttatgaatacgttgacgttctaaaactggatcgggttcaggaacagctgataagagactttgagtataaggatgaatggggtgatggtaaacctcatcagatgtcccaatttccacaatttttccccaatgcatcacaccaatgcgatccgaaatatacttaaccattgataaatcatgagcaatgaacaggtacgttagtccctgttcatgctgcagtttttgcatgagattaacaacctgagcttggatagagacatccaaagcagagatgggctcatcagcaataatgaatttaggctcaaccgccaaagcacgagcaatcccaatccgttgacgctgaccgcctgaaaattcatgcggataacgtgttaaatgatccttatttaacccaaccagatccagtaaatcctgaacttttgcgtcacggtctgccttatttttaaccaatttatgaacatcaagtccttcagcaataatatccctaactttcatgcgactattcaagctggcttgaggatcttggaaaatcatttgcgctttcttacgaaaattaaacaatgattttccctttaattttgaaatcgtttcgccttcaaaatcaatttctcctttatcaatattgtaaagttttaaaatagcacggccaattgtcgtcttacctgagccagattccccaacaagtccaaaaacttctccttcatagatatcaaagctgacattatctatagcttttacttggttggcttttcctttattgaatgtcaaagaaacatttttgacttcaactagttttttacgattttcagtcattatgcttttctccctgtaagctcttccattttccccaacgctgcaaaattctttccggcggagtaatcttaggagcacgatcatctaacagccaagtagcagcataatgtgaatcactaactttaaaaaatggcggctcctccttaagatcaatatcaagagcgaattcatttcttggagcaaaagcatctccttgagggggctgcaacaagtcaggcggtgttccgggaattgaatgcaaactgcctgaagctgtattagttgtaggcatcgaattgagaagcccccaagtgtagggatgctgtgggttgtagaaaacctcatctactgtaccatattccacaatcttgcctgcatacataacagcaacacggtctgccatacctgcaacgacacccaaatcatgagtgataaagataatggaagagtcagtattcttttggatttctttcattaaatgaagaatttgtgcttgaatggtaacatcaagagccgtcgttggttcatctgcaataaggatttcaggattagttgccaaagcaatagctatgacagcgcgctggcgcataccgcctgaccactgatgaggataatcgttgatgtgttcttgcgcattgggaataccaaccttttccatcatgtcaagagcccgcttgagagcttcttttttagttactttttcatgcttgataataggttcagcaatttgaaggccaatacgcatggttggatccaaacttgtcataggatcttggaaaatcatggaaatatcatttccgcgaatatgaacccagtcttcttccttcaaatcatttagattgcgtcccttaaactcaatatctccgaaaatctcagcattctttgctgacaggcccattaaagttcgtgtggtcaccgactttccagaaccagattcgccaacaatagccagcgtttcccctttttctaaataaaaactaacatcgcgaatagcttttacttcacctgcataggtatgaaaattgacatggaggttattgacttgtaaaattttttccttactcatattttcctcctagtcttgtcctgattttggatcaaatgcatcacgtaaaccatctccaagtaaaataaacgctaaagaaataaagactaaagcaagagccggtaagatgatttgataagggtaatattgtaaattttcttgagcatcagaaataagagaacccaaagaagacgttggtggttttactcctaaattgatagctgaaagaatagcttcatacataatggcagaaggaatcgtcatcataatttgcacaataataacaccagaaatattgggtaaaatatgtttaaaagcaattttaggactgctttcacctaaagttctggcagctaaaacaaaatccctttccttatatgataaggtcatgtttcgaacctgccttgccattgaagtccaacccgttaaagcaatggacaagataattgcaataatcccattccctaataaaagccctaacatggttacgataattagatttggaacagaagaaataatttcaataatccgctgcataatgatatcaacagcaccgccaacatagcctgaagtcagaccataaacaaccccaataagtaagtcaatgcaggtagcagcgactgctactaaaagcgaaatacgaacaccaacaataatccgcttacctagactgcgtcccaaactatcggttcccaaaaggaatgttttcccttttggaacggcttgatcttcatagacattggatgccttgctagaacctggcatctgaaaaacaccattccaacccggaataccaagaccgctattaggcggcaaattactataagttgataccttgtccgaatcaaaactattagcatctttttgtgatacaaacaaaggagataccaaagaaaaagagattaataaggttaaaaaccaaagtgaaacaactgctaacttatttttctttaaccgtcgccaagcatcttgtaagaaagatagagccggcttttcaattttttcttgtgctttggtgcttcctgccccaatgagcacaaactctctatttttatctgccatgtcactctccttactgcaaacgaacgcgcggatcaacaatgctggtaacgatatctgtcaataagatcatactcatcaacataacagcataaacaatcgtcgttcccatgataacaggataatcattggaagggatggaattcacaaactgctccccgatacccggaatcgaaaaaattctctcaatcaacacagaacctgttaaaagattagcagccataggacccactaaggtcaaaacaggaatcattgaattgcgataggcgtgatgattggcaacctgacgttctgtcaaacctttagcacgcgccagttgaatgtaatcagagttcaaagcttcaatcatctcacttctaacaaaacgagttgttactgcaaatggattaaatgataacgccaaggtcggcagaatggtttgagcaaaagagccccaaccagatacaggtaagaattgcagacgatagccaaatgtattcaacaagaaaacagccaaaatgaaagaaggaacagaataaccaagtgttgaaatgacacttaggagtccatctattttatcattttgatgacgcgcagaaagagcacctacaatcaaacccattccaacacctaagacaagtgcttgtaaaccaagttgggcagaaatacctagcctttgaacaataagtgtcgtcacagattgattggtatattgaaaactagttcctaagtcacctgtgaagacatttttcaaatagagcaaatattgttgccattgaggtttatctagaccatattgaacgttcagagcagcaatagcatccggacttaatttgggattgttaaagggagttcctttcatcgctttcatgagaaagaaagtaatagtgacaactataaataaagtcagcaaaagaattcccaaacgtttaagaatatatttgagcataatgattccttttctttgtttttatcggcgaaagctctccaataaaaacaagaactggcatcaagccaatccttgccatgtgtaaaagtgttgttatcttaaaagttatttcttataagcataggtgaagtccacattcaaacctgtagaactgcgaatcagacccttgatacttggattttgcaatgacttcgtactgcggaagtaaattggattaacatttgcttcatcaaataaggctttttctgctgctttataatcttcagctgcctttgtaggatttaaggcatccgttgtaattgctttttcataggcctgatcataagtagaatttacgaattttccaccattataaggtgaacttgtcgtgaaattactgtagaaggtcgaaccttctggatagtcgccgccccaaagagacatgacaatctcaaagttttgattttgtgtatcttgaatacgctgtttgaacggcacgaatttttcttcaattgtcaaacctggaagcgccttttcccaagctcctttaatatagtcaagaccagatttagctacaggtgaatcagcatcggaagtcactgtaaatttcactgatgtttcgccaatctcttgcaaaccttccttaaagagttgttttgctttggcggcattataagtatagcccggtgccacatacttagaaagatccttaccatccactttggccaatttataaggtgctacgccagttgctgcgcgtgaacctgttggtatcgctgtttctacataagccttacgattagttgcataattcagtgcttggcgaattttcttattagctagagctttgttagtgcctgtttggttatactgcatgtaagcagttgttgcttcaaagacatcaacgacatctttgttgcccttgttagctttgaaaagagctggagtatttgaaatattagctgtatctaattcaccacgcttatacatttgaacagctgtctcaggtttttttaccgtttggaaattaatggtatcaattttgaccttgtcagcattccagtaatatttattctttttcagtttaaaactgccgttagtgccattccagccacttaaagtgtaaggtcctgaataaatttgactcttggcattggtcccatatttactaccgactttatcaacaaaggattgtttttgtggcataaagcttgtgaaagcaagcagatatttcatctgaggagtcggtgattctaaggtgaagataactttattgccatcagccttaactccgagttcattaagatctttaatgtcaccgctattaatggctttggcattctttacatgagactcaacagcaagacctgaatattctgaagctgtctttggattaaccatacgctgccatgagtaaacaaaatccttagctgtaatggcactaccatcggaccatttgatgcccttgcgcaatgttgctgtgtaagttaagccatcttttgacacttccacttttttagcaaggtcaggggctggtttgcctttatcatcaacacgcaacagattacttcctgaatttccaatcgcgataccagaataagtatctgtactttttgaaatatccaaagaattgatatcaactggagtataccaattaatctcatcttttgaagtttgcttgttcccgtttccacaggctgctaaaatagctgctgaagtaacagttaccagccctaaaccaacacgtttccatggacttttctttattgctatcataatgtctcctctttacttttcaataatctgaaaattgaaactaatatcatttttattttagcgcatttcttcccttttagcaagcttctgtcaaggaaaaaattggttttgaatcttccaatttatgaacgatatataaataaatttaaaatacaatcgcgatctcctaaaaatcagttttatcgtcctactcctaaaaaaatagtccaatttctcttctctatttaagggtattagattttttaggaaaagcatattcactcttaaaattatgctataattaaatttatgatgaaaaagattgtatgcttactatttattttaatatccctaatcggctttggggtaaaggctgaagagaactttgatgtctctgctaagcatgccattgctgttgaagctaatacaggaaagattctctatgaaaaggatgccgataccactgccggtattgcttctattactaaaatgctgactgtttatatggtttataaggaaattaaatctggtgatctcacctggtctagcaaggttaagatttctgactatccttatagtttgacaaaggattacagcgccagcaatgtccccatggatgctagagaatatacagtaaaagaattagtagaagcttctatgattgctagtgccaatagcgctgctatcgctttggctgaaaaagttggcggtactgaacctaaattcgttgatatgatgaaaaagcaactacaagaatggggaattacagatgccaagctagttaatgcttctggtcttaacaataaaactttgggcgatcatatctatcccgactccagctctgaagatgaaaacatgatgagtgccagagatgttgctatcgtcgctcatcacctaatcaaagaatttccgcaagttctaaaaatcacggaaaaaacaaacagtgatttttcaggaaataaaatggaaacctataattatatgctgccaaatatgccttatgcgcgtgaaggtgttgatggtctaaaaacaggaacaaccgaattagcaggtgcttgctttgtagctacttcaaaggaaaatggtatgcgcctgatttctgtcgttttaaatgccgacaagtctgatagtgatgatgacgccgcacgttttcaagcaactaataatttattaaactatgtcaacaatacctatgaacccatcacacttattcacaaaggtcagacgtatcaaggaagcaaggtcaaggtgattgatggtaaaagaacaactgttcctgctgtcgctaaaaagaattttaccgtcattcaaaataaactatctcataaaaaaaatactgtttccatcgcttctaaaaaaaatggttacacagcagttattaaaaaaggacaactaatcgcaaaggctacttttaaagatgacaatcccgttggtcaaggctacctagagacaccaccgagtatcccattagttgctaaaaaagaagtgaagcgcagcttctttcttaaagtctggtggaatcattttgtcagatacgtcaatgagaagttataatgaaaaagagtctggtgacaaatcaaaagcagtgagacttgaatcataaccacccgttaaacgggtggtctgcactagggctataagcccaaattatcagccagcatctttaggcgctggctgatgtgctgatgtatggaattataatccttctgttccattctctgattactgctaaaacaagctgaggagttttattctttttcagtttacaaaacctaaagctcaatcagtaagacgaacaagttatctaagcatccgaatcagatacagaaaattgagaatctgaaagcttattccacctcgaaaatttacctttggctatcatatcaagctgtcccctgctaccagcataagataagctcaacttaaatgtttttaaatgaaaagttttcttgtcaaaggtaacttcaaatcctttcttcaactctgactgactaacccccctcaaatagagattcaactcttccttaaacaaagaaacgatatctacattctgactgcgtaagccaagcctataaacattgccactttgcttaagaactaaatcgtccttcatggtatagagtacttttaaaaaattaaaataactaggatgaacccgataactgcctgcagcgtttgacttagtccaattgccgtctttagaagtccgtgattgagaactgttttggttaccaactaactcttgataactatccacaccattaattgtttcttcaataataatgttagctctattaatactagcagcataagaatcatacccaatatcagctgtcatggtctgatgttttcgagtacgtgattctacgtcagtcgtcatatcaaaatgcaccgtttctacagaacgattggctcttttgactttcttaaagaaatcgctgacagtcatcttatcatctcgtttgttcactgcttgctgcgcttttttaatagactgattaacattttgaagatcacaagctgtcactatcaaaagactaacaaagaggcttataagaatgataaactttcttttcatcttgtctccctttacaactaaaaataaattcttatttcttttattctaacattttttgaaacccctttcaaatccactatctctcccttgtgagtttagtgaaagaatagattaatttgttaaggactgcagaacaaaattttgaagttaccattcatctgcccctttacctttagttattttatcaatctgctggcttcctacttgatttaaagcttactttaatgtaaataaaaaagctttaaaaacaatgagctatcattgtttttaaaacttaatcataacgttttaattaaccaactgaaccctccatctcataggaaatcaaacgattgagttcaatcgcatactccatcggaagttccttggtaaaaggctcaacaaagcccatgacaatcatttcagtagcttctgactccgttaacccacgactcatgagatagtaaagctgttcttctgaaatttttgaaaccttagcttcatgttccagagcaacttgtgaattgtggatttcattaaaaggaatggtatcagatgctgaaatatcatccataatgatggtatcacattcaatatgactaacagatttttgagatgacttattgaaagatacttgcccacgataatctacctttcctccacctttagcaatagatttggagacaatagaagaactggtatgaggagcgttatgaatcatcttagctcctgtatcctgatgctgaccacgattggcaaaagcaatggatagcatggtgcctcgcgcaccttctccgtcaagataaacagatgggtatttcatggttgtatgggctcccagattaccatcaatccattccaccgttgcgtttgtcatagctttggctcgcttagtgaccaaattgtaaacattatctgaccagttttgaatggttgaataacgcatataagcaccatcaagggcaaaaatttcgacaatagcagcatgcagactggccgttgaataagtcggtgctgtacagccttccacataatgcacgctggcaccttcatcaacaataatcaaggtccgttcaaattgtcccgttccttcattattgatacgaaagtaagtctgcaatggaatatctactttaacaccttttggcacatagataaaggttccacctgaccaaaaagctgaatttaaagctgctaatttattatcagttggcggcaccaattttgcaaaatattttttgaaaagttcaggatattctttaagagctgaatcagtatccgtaaaaacaataccaagtttatcatattcttctttcatattatgataaacaacttctgattcatactgagctgaagctccagctaaataagcacgttccgcttcaggaataccaatcttttcaaaagtatctttgattttttctggaacttcctcccatgaacgtgctggtttatcagttggtttttgatagtaaatgatatcatcaaaatcaatacctgttaagtcaggaccccattcttgcatgggcattttataaaatatctccagcgatttaagacggaagtccaacatccattctggttcacctttgatacgggatatttctcgaacagcctctttcgtcggaccttttccagttgatgcaatcggtttaacatcatcatgaaagccaaattgatagtctcctatgtcaattggctttggttctactctttcgttttctggcataataccctttccttaattctttaattttcttgtcgctcaatagctttcttaagggcattccatgccaaggttgagcatttgatacgttgaggaaatttggaaacacccgcaagaaatgctgcatctcccaattccttttgtctatcatctttttccccttgaaccattttagaaaagatatctgctaattcaagggcttcttttttagtcttgccaatgacagcgtctgtcatcatactggatgaagcggttgaaatcgtacagccatcacctgcaaaggcaatatctgatattttatcaccatcaaatttaaccgataaactgatgacatcaccgcaagtgggattattaagattaacctgttccacatcttctaaaaaaccatgatgatgaggatttttcgaatgatccccgacaactgccatataaagactatctaatctagagagtgccattaaagaactcctttgttttaagaatcgcttctattaatttgtcacagtcttcttttgtattataaatataaaaacttgcacgtgctgctgaatgaagacctaaataattgatcagtggctgtgcacaatgatgtcctgcacgaacagcaacaccttcataatcaagtgctgttgctacatcatgaggatgaagaccctccaaattaaaggaaatgaccccgatatgctttgcaggattctcaggtccatagactgtcaactctttaatagcttgcaacttaggcaaaacataagccactaattcttgctcatgagcctgtacctgttccattcccaattctgctaaataatcaagtgctgcaccaagagcaatggctcctgcaatatttggtgttcctgcttcaaacttccaaggcaagtccttccaagtggtcttttgttcatagacaaaatcaatcatttcaccgccaaattcaacaggactcatttgcttaagaatgtcttctttaccataaagaacaccaataccagtaggtcctagcatcttatgacctgaaaaagcaaagaaatcacagtctaagtcttgaacatcaatagtcatatgaggtgccgattgtgccccatcaacaaccatgtaggcattgtgctgatgagccagctgtgcaatttccttgataggattgatacagcctagcacattagaaatatgggttaaactaataaatcttgttttagcagaaactttatttttaagatcttctaaatcaagctgcccatcttttaaataagcataaactaacttagcacccgttttccggcaagcttcctgccatggaacgatattagaatgatgttccatgacagaaataagaacttcgtcatctgcttgtaacacttcctcagcaaaacgagcagcccaattcaaacctgttgttgcccccctcgtaaaaagaatttctttagttgagtcagcattgataaaacgacggactttttcacgagcagcttcgtaagcagctgttgctctttcagccaagctatggacgccacgatggacattagcattatcctgtctatagtaatcattcaaacaagctaaaacctgttttggcttttgagttgtagctgcattgtcaagatacaccaaaggttcatcattgacaatttgttttaaaatggggaaatcctgtttcatcttttgagtatctaatgtcatgattttatctcttatccaatttttcatccaaaacagcaatcatttcgtcacgaacagctttaacaggaatttcagtaatgactgttccaaggaaaccacgaataaccaaacgttctgctgtttctttatcaatgccgcgactcattagataatacatatcttctgggtcaacttgtccaatagacgcggcatgccctgctgtgacttcattttcatcaataagaagaataggattagcgtcacttctggctttatcagaaagcatgaggacacgactttcctgctgagcatctgctcctttagctcccttgataatatgaccaataccattgaaagttagcgttccacgttccaagataaccccgtgttggagaatatgcccgatagagttattgccgtagttggtcactcgagtgtcaattccttgaatttgacgaccgcttgacgccgcaacaactttcaactcagcatgactgccattaccgataagatcgctgtcaaaatcagcaataacattgccttcattcatgacaccaagtgcccaatcaatgctggcatcattatcaagacgcccgcgacggcttatataagttgttatattattacccaaacgatcaatagcagcaaatttcacttgactgcctgcctgtgctaaaacttcaactgcaatattggcagtagcctttacatcgctatccccaatcgtctcaaaacgctccaaataattaaccttggcatggcgtccagcaatgattaaaacatgcttattcagcggaacattgctagtactgtcctgcagaaaaatcccttctaaaggcaggtcaatttcaacattgtcaggcacataaagaacggatccactgttaaaataagctgtatgataggccgacaacttatcctcatcaaatttaagagcagtggcaaaatacttctcaatgacctgtggaatttcttctagagctgaatgaaaatctgtaaaaacgacgccttgttctacaagctttgccggcaagctttccaaaaccgtttgtgtgccaagctgaaccaacttaggattctctccaaaggaagtgaagtctggaacattagccgaaattggactttcagtaatcgtaccgtcccccaaattccaacgttgaaatttaacacgttcaattcttggaagctctaagtcatcaatcttatcaaaagccgctaagcgtttttcttgtagccaagcaggctctgccttagattgtgaaaatgttaaaatagattcttttgtcatttgttactccctttctttcttgttaagaagttacaaattagacttcttcgctgtattcaagaccgagttcttcagcgatttgggcataaccttctttttcgagtcgagctgccagctctggtccgccagataatacaacacgaccatccatcataacatgaacaatatctggtgtgatgtaattaagcagacgttggtagtgggtaataatcatagcaccaaagccttcaccacgcatggcattaactcccttagaaacgaccttaagggcatcaatatcaaggccagagtcaatttcatcgagaagggcaaatttaggctctaacatcagtaattgcaagatttcattgcgttttttctcaccaccagaaaagccttcgttaaggtagcgctctgccatttcttctttcatccccagcaattccattttttcatccagtttcatgataaaatcacgaacagaaatcttctcatcatctttcttaccagcattcattgccgcacggatgaattctgcattagtaattcctggaatttcagacggatattgcatggcaagaaaaagccctaagcgagctcgctcatcaacttccatttccaaaatattttcaccgtcaagtaaaatttctccttgtgtcatttcaaaaatgggatttcccataatagctgctgaaagcgttgatttcccagtcccgttaggccccataatggctgcaatttcacctgttttcaaggtcagattaacaccttttaaaatttctttatcttcaatagagacatgaagatcttttatttcgagtacagacattgtacgctcctttcatttatcattattcattataacaaaaaaagtccaattggactttcttcttgtctaaaaattactttttcttcttacggcgatatttagctactacttcttgacggtaatcactattgccaataaaagccaatagtctgaagagtggtgttcttttaggtccccaaatctctaaaccttcaataaaaatttccaaagcaaaggcaacaccaatcataagaaggatcccacccagacgactggatacatttaaaagcagagataccaaagagaagaacatagcaatgccatagacgactaaaacagctccgcgatgagtgaatcccatagcaagcaatctatgatgtaagtgcatattatcagcttcgtaaaatttctgacctgataaggttcgtctgataatggcgaccgtcgtatcaacaataggaactcctaagacaatgataggggtgacaacagcaaccgccgttgcattttttaacccttgaagagataaaaccgaaatcataaaaccaataaataaagcaccagtatcaccaagatagataatagcaggatggtaattataaggaaagaaaccagcaatagcaaagatcaaaacaaaaatagtaagtgttaaaaaaatatcggtatcatagagaaaaaaataagataccaatcccatagtggtcagactaatcatcgaaacaccactaaccaaaccatccaaaccatcaatcaaattaacagcattagtaatggcaacaacccacaaaatcgttaagaagaaactcaagaaaggattaaagtggagcatgggaccaccaaaaggaatcttaaaactatcaaatcgaaagtctgtaaaaatccaaataataacagcaccaagcaaaatacctaagaattttattttaggtgagagttcataaatatcatcaataaaacctgtcaaggcaatcactaaggcaccaagaacaactggtaagatatattcaaaataggattttcctccgatttgcgtttttagaatcatgggcataagagccaatgttgcaatcacaaatgaaataataatggcaagtccgccagcactaggcataggaaccttattaatccgtctcgcatttggattatcaactgcccccaccctaaaagcgaaaaatctaactaaaggagtcaaaacaagtgaagtcaaaagcgtcgcaattagtacaagaacaaattttaaggtaattggtatcatctagcttatccaatcatttgtaattcttgcagagcatctgctttaatgagctgaactccatgttctaatagataagcacgtgtctttgttcctctaccagcatgctccaacattcttgcaaacataagatcagcataatagtcaggtttatcttcgagattaagcagaacagtcatgtgataagcgtcagactccttaaaaagttctgaagcctctacatcatagtcaactgtcttagcaaaacttatgacttgctgaatattaggaaaatccagcacaaagtgaacgtagtctcttttttccttagtttcacctttttcttgctgagtcttctcttcttctcttttttcaatttcagccaatttatccagagctgcagcatcccctttttcacgcatggtttcctccaaggtattaaagaaatcctccggggacatttttgaaatatcatcaaaatcagacaaatcctccaaattaagatttttattgatttctgacttagtgacaaaaacatcaatacgatcattccttggtgttactcgaaagcttaacatcccactgtccttgaaattttcaggcaagtccagctcatccataacagtatagaaaaattcttccgtcttttcctgcggaatcaagaaatcttttaattccatgcctctttcttctaaatcttccatactgatggtgatttttaatgttgtttcgctgatttgtttcatttccatagtctttacctcatacgagtagttatttcattatacaagaaaagcccatttttttcaattttagagcaggcaaaaatgacaaacaaatttcagccaaataagaccttcattaagccataaaataaaagaagtatccccaaaccaatacggtatttcccaaagaaagtaaaatcatggtttttaacgtaatctgttaagaagcgaataacgtaaaggctgactgcaaaggcaactaacatagccactagtaaaatgaaaagttgactaccagttagaatcgtgcctgatacaataaatttaagcacctttacaaggctagcaccaaacataatcggtattccgagaaagaaagtgaattctgttgcgacttgccgactggttcccagcaaaataccacctaaaatagttgctcctgatcggcttgttcccggaattaatgacagcacctgaaacagaccaatgaaaaaggccgttttataaggcaaacttaccaaatgagttacctgcggttcaacaccttgatggcgtctttcaacgtagataaaggcaataccataaagaatcagcatcaaagcaacgctaaagaaattttggaaatgtgcatccagccagtcatcaaatatgaggccaatcacagctgctgacaaagctgataaaataacctttgcccaaagctgccaagtaatctgtacttcacgcgctgttttaccgcttttaaaaggatttaaacgatcaaaataaataacaacaaccgctaaaatagcaccgagctgtatcactacattaaacatattggtaaaagctgcgttggcattgttaaagtgaataaattcttccactaaaatcaaatgcccagtacttgagataggaagccactcggtaattccctccacaatcccaaaaataatagccttaatgatttcaaaaaacaacatcttttctcccttttatttacttcttatgagtcaaatttactttacttgtttactaagttagaaggctccgccgcctccaccgcctccgcctccggagaaaccaccgccgcttgagccgccagacgataccgaaaagtttgaagcactcgtagcagttgaggtataggttgataaatctgcggttgactgtcccacatagtaactcgggttgatctcaagataagtattcatttgtgggttctgcaaatgaatatttttaactttcaaataattttgaacacgttcagcatatccgtaaagggtggcatagaccaaaatacggttccagataataaccccttcaagttcgacatcatcaaatctcttaatgtcacgaatcatattctcaaaagaatcccaaccctgtttgatagcaaggccttcttgcgtaagaagacttgaaaccttataataatcatcttttcgacgatagaaaatcagaaaaagactggctacaataagcaataacagattggtcccaagccccagccaataacccttgataagagcaaaagctcctacaaaaaaggcaaacaacatggcagtagatgcaaagaaataaaccaagataagctgagtcttttcttcgcccgttctctcacgatgaatatcattcaaactcaaagagcttattttatttttaacagccttatctaacttctccatacgattttcaaacaaatggagaatatcaccgccccgtctacgaatttctgtctcattgctgcccttgaaaatgcttttgtcaattttataatcatcaaaagcaccatcaataggcatggtctttttattatcgccataaacaaaaataagaaatctcttttcatagctttctagtctattccaatcaggaacaaaaaaagatttatgatcatctgcaatgactagttttccttgatcaatcaaatctaagaggctagcttgaatcagctgtttaaaacctaaatcatatcgcttccgcttagttttcaaaggagataactcttgaatttctaaatcataaacataacgagaaagaatcaaaggggataagtcagccggcggactgaataaatgcatatgccttgctgtttttctctgtcctaataccactttccaagtagcatagagaacaatagaaataaggataaggatggcgctgaccatcggaaacagccagccgactaaaagaggataaaatttctgacgtctggcaattttagcttcaagagcttgaaactttgataatctcttgcttgacttgtcggtggcagcagcaaaatccgaacgtttccaataagcatgcagttccaactttttattcttgccaagaccctcaatattaacttcatagtttccatttttttgagtgactttaggctgctttttaaagtagcctgtatgagcatggaacctgcttacagccagcgaatttgaaggtcccttaactgtcaggacgaccttatccaaaggagcatcccaatcactaatcggtgtccaattaagttcagcaatatcagaataaatagttgtgacatggtgaagtttccactttaaagaaaggacaacacgatcaccgctatgtccgccattatagactttagcgcgatagccatctgacagctgttctattttggtctttatcgggcgttttgtcaattttccctgctcgttaacctcataggctttcacttcaggattgctattaattttaaatcctttaggtacattgcctgctgaacccaaggtaacgtattggccattgtaggatgaagcaaaatcataaacaagatcctgttgaaaagtcgctgtattatctttattaagtgtcagccttccccaataaagtctgatattataatcaacatccttagctgaaacaaagctagttgttaccaaagataaacaagttgctaagaaaagcagtaatttcttcatttataaacctcagtatatcaagaattctttttttattttatcataaaacccagtcaaagataaaccttctattttcagatagtgatattgaaatacgctactttttgctgtaaaatgataaagtaaaaaattttatacaggagtcttctgaatgaaaaagacaattttaagctgtctggctgcccttttcatgctgtttattggtgtgacaaatgctcaggcagacaactacctacgtgttggaatggaagcagcttatgcgcctttcaactggacccaagacaatagcagcaatggggctgtacctattgaaggaacaaagcaatacgcaaacggatacgatgttcaaacagccaaaaaaattgctaaaactctgggcaaaaaaccactcattgttaaaacaaaatgggaaggacttgtgccagccctaacatccggaaaaattgatctgattatcgctggaatgagtccaaccaaagaacgcaaaaaagaaattgccttttctaatagctactatactagcgagcctgttcttgttgtacgcaaagacagtaagtatgccaaagccaaaaatctcaatgacttctcaggcgcaaaggtgacctcccaacaaggtgtttatctttataatttgattaatcagattcctaaagtatctcggcaaacagctatgggagacttctctcagatgagacaggccttagcttctaatgttattgatgcttatgtctccgaacgtcctgaagcgctgtcatcaactaaagcaaattcaaactttaaaatggtctctttaaaaaacggttttaaagtaagcaaatccgatgttactattgctgttggtatgcgtaaaggtgatccacgaatagaacaagtcaacgctgccttggatcaatttcctctaaaagagcaaatatctttaatggataagatcatcccaatgcagcctagtcaaaataacagtgatcaaaaagaaagcaaatctaactttttcgaccaagtcagcaaaattgtcaaaaacaattggaaagctcttcttcgtgggacaggtgttactttactcatttcaattattggtacaattgccggtttgattatcggccttcttattggtgtttatcgtactgctccaaaagcatccaatcttatcttagcttggttacaaaagatttttggctggttactcacggtttatattgaagtcttccgaggaacacctatgattgtacaagccatggttatatactacggaacggctcaagcttttggggtctctcttgatcgcacacttgctgctatctttattgtctctatcaatacaggtgcttatatgagtgaaatcgttcgtggcggcatcttcgccgttgacaaaggacagtttgaggctgcaacagcacttggtttcacccacagacaaaccatgagaaagattgttcttccgcaagttgtccgcaacattctccctgcgacaggtaacgaatttgtcatcaacatcaaggatacctctgttttgaatgtcatttctgttgtagaactctatttttcaggtaatactgttgcaacccagacttatcaatacttccaaaccttctttattatcgctgtcatatacttcattttaaccttcacagtaacgcgtattcttcgtttggttgaaagaaaaatggaccaagataattacaccaaaattgaaggagaaacaaactaatgactgacattattttagaaattgaccatttaaaaaaatccttcggcaaaaatgaggttctcaaagacatttctctaacagtcaaaaaaggggaggtcatctctatcattggatcttcaggatctggtaaatcaacatttttacgctctattaacctccttgaaaaacctactggcggtaagattctctatcgcggacaaaatgtgcttgaaaaaaattatgacttaaccaaatatcgtgagaatttagggatggtgttccaatctttcaatctctttaacaatcttaatgttcttgaaaatgccatagttgcccaaacaaccgtcctcaagcgcaatcgtacagaagcagaaaaaatcgctaaagacaacctcaacaaagttggtatgactgaacagtattggaaggcaaaacccagtcagctttcaggcgggcaaaaacagcgggttgctatcgcgcgtgccctgtctgtaaatccagaggccattctctttgacgaaccgacatctgctcttgatcctgaaatggtcggtgaagttttaaaaacaatcaaagatctagccaaatcaggcctgactatgctgattgttactcacgaaatggacttcgcccgcgatgtatcagaccgcgttatctttatggatcaaggtgtcattgcagaaagcggaaaacctaaacaaatctttgaaaatcctcaagaagaacgcactaaagttttcttacagcgttttttgaagtaaacttatctaaaatctgctaggcaaacttagcaggttttttagttttacaattttcgccgtaataattaagaaactgccttattaaatagacatcatcaaccagctcttgaaacacataataacccacttaaagaaagattaagattatatctttataatcatagtcaagcaaattcaaacgaaatataccaaagtcaaaagaaaagacttaatgggtttcatttgaattgatactctttaaatttagtaacaaacttttctttagtgagtattaacggagaatcaaaaaggaggtctaactatgataacttcacaaaaaaatggattgcaaaatttacctcttttctttttttcctttataatatcaaaatggatttacgatcactttctcatttcttatgctcactatattgctaattacggcatgagttttgccttaaggcttaatatcattattacctttatcttaacttattttacttttgtttttctaaagttttgccaaacacagcaaatccgaaacacaagcatcatgatctgttacttaatttacattttgatgctcatttatgttatctttctaaaagacattggtgctcaaggactctcgcttaatcctctttcctttattaccgaaatagctaatagcagtaaatttgtccccgtcatgaatctacttatgttcatccccttaggtcttctgtttcctctgtcaaaaaccaatttatctttctctttgttgggacttttattaatagaaagttgtcaatatatgtttcatttgggaacacttgatttgggtgatgtcaccttaaaccttcttagcattgctattggcaataccttgcatttccagttacaaaaatggataaaaaattatagaagcaattaaatttaagaaaattttgtttttaaaatagtacaagagtaagaagagccattatcgccttactcttgtatttttgtttcgtttaaaaatttttgtaaaatgagttaatttttcttgacaagtgagtgaacacttactataatgagttaagtacataagtaagcactcactcactttattttttagaaagaagtctttatggaaaaattactagatttacaagctattcgaaaaaattttggtcatcaagttatccttaacaatattaatttcagtttggatgctggtgaaattattggcttgattggtccatccggtgccggaaaatcaactatgattaaaaccatgcttggaatggaaaaagcagatgaaggggaagcacttgttctcaaccatcatatgccaaatcggcatatcttaggagaaatcggctacatggcacaatccgatgcgctttacgaaacactttctggtttggaaaatatggaattttttgctcaaatgaagggcttaactaaaatagagattccccaagccattgatcacgctacccaagttgttgatttatccgaacatcttaataagtcagttgcgggttattcgggaggaatgaagcgccgtctatctttagctattgcctttctgggaaatcccagactccttattcttgacgaaccaactgttggtattgatcccgcattgcgtcgcaaagtctggaaagagctacgccaattaaaaaaagatggtgtaggtattttagttacaacacacgttatggatgaagctgaattaacagataaggttggcttattactagatggaaaaattatggcttttgatagtccaaataatttaaaatccatctatgctgttgatactattgaagatgttttcttgaaggcagaaggagaattatgatgagaattttagccatttcaaaaaaagtactactagaattattacgtgataaacggtctctgatacttttgtttttagcacccattttcatcatgtggctgatgaatactgccttttctgccagtacagatacccatgttaagatagcttctgttaatgtctctgatactgtcacaaaatcactagatgatgtcaaacatattagtagcaaggattataaaactgaaaaagctgctaaaaaagctttaaaagatgaaaaagttgatgccatccttatttacaaagataaggaaaattataaggtaacttatgccaacactgaccccagtaaaactagtttaacgcggcaagctattaaaagcactctaaaacagacgcaggttcaagaattggttcaaaatctcaaaaaagcacagcaagcaagtgctcaggccgctaagaaagcacaggaagcacaggccaaagctgctcaagctcaaggcaatcctgcacagtccggaattaatagcggaatacaggcacaagccgcaagtaacactggagataaacaaactaaagtcaataccaaacaaaccaaatttgatttgtctgaaaattacatttatggagataaggataccactttctttactaagatgacgccaattcttatgggcttctttgtcttcttcttcgtcttcctcatctcaggcatggctcttcttaaagagcgcacgacaggtacacttgaccgtctcttagctacaccagttaaacgatccgatattgtctttggttatatgctatcttatagtttcatcgcagcactgcaaacaacagttattgttttgtcaactatctggcttttagacttagacgttcttggtagtatgggagatgttattgttgttaatattctctttgctctcgttgccctatcctttggtcttttgctgtccaccttagcccagtcagaattccaaatgatgcagtttattcctattgttattgttccacaaatctttttttcaggcattattcctctagattccatggcagactgggtacaatctctcggtaaaattttacctctctattacgctggacatgctctatcaaaaattattttaaatggtattagtatttttgaacttgaacccgacttgtttgcccttcttatcttcttagccattttaacggcgcttaatgttattggactaaaacgctaccgcaaggtataataaaagagataagagtgaggtaattatggaaaacaacacgattttacacaactatcaggattggctagaacatcacaaaatgcctgcggggaaaaagaaaacattggtcgctgctattgagctcttttctcagcaaggctataatgggacttcaactgcccaaattgcagaaaaggctggaattagccaagcaacgatttttaaatattttaaaaccaaaagtgacctcctatcagaaattatgcagcctatgattcctgaactaaaaagagattttttcccaaaattgcaaacttatactaaacttgaagaagttgttcactttattgttcaggatcgttttcaatttttgactcagaatgctgaccttatcaaaattcttatccaagaagctcttgtcaatataaaattacgaaaaacactgttaaccaatattcaacttacaatctcaaaagatttcatggcttattggcaaacgttaaaacagattaatcctcaaattaatcctaatctcagtggtattgaggttatcagaaccaatgttggcttactctttgcttacttcacacagcgttttattttaaatattccaacaccatcagaacaaaaggatttacttctaattgaaaaacaaattttaactttgctgatacttgatacacattaaaaaatctataagtcttctatttagtcctgaaaccagactagaaaaaactcccaatttccataaatatgaaagttgggagttttttctgctatcagataatcaaacagctgtttaaaataaatcatcttgcttttaaggcagacatgacttgtgtacgaatgtcttctgctccttcaggattagcaggtaagaaaatggaactattgccatgttgcgcaaaggtattaagagaatcaagatattgattagtcaaaagaatagacatgatttgctcttctgtcaatgatacattagtaccctttaattccatgatagactcagctaaaccatccacaatcgccttacgttgttgtgcaataccaacaccatgaaggcgatctttctcagcctcagcttctgcagcagtgacaattttaattttatcagcatttgccaattcttgcgcagcaacgcgcttacgctgtgcagcgttaatctcattcattgattgtttaacttcggcatcaggttcaaccttagtaatcagggttttaacaatgatataaccgtaagttgacatttcttccgcaacttgatgctgtacttcaagagcaatttcatcttttttctcaaataattcatctaaagttaatttaggaacagacgaacgcagagcatcttcaatataagattgtatttgcgcttctggtctcatgagtttgtaataagcgtcagtaacattttgctcattaaccctatattgcgtagcaacattaagcgtcacaaaaacattgtcctttgtcttagtttcgacaataatttccgattgaagcagacgtaattggatacgcgcagcaattttatcaattccaaaaggtaaacgtaaatgaatcccactagcggaagtcaattgatatttaccaaagcgttcaataatagcaactgtttgttggcgaacaacataaagtccactggcaatcaaaaggatgaccaaaaacagtatgaaacacaaaaaaataaaaactcccatgataatctccttttttcatattatagactatttcaaattttttgacaagaataatcagacgagcatattatacagactttcattgccatgaagattgatataacctgggtcaaaagcacccaaacgatcaattagatcctgataatcatttttatccgctaaagtaatgccgattaggactggacctgttcctttattggcacgtttaatatattcaaaacgggtgatatcatcatttggtcctaaaatatcattaacaaattcccgcagagctcctgggcgttgtggaaaattcacaacaaaataatgcttcacaccatcataaataagtgcacgttcttccatttcttgcatacggttaatgtcattatttccaccagaaataatacagacaatagttttgcctttaatatcatctttcatttcttccagagctgcaatagaagctgctcctgctggttctgcaataataccttgtttagaatacatatcaatcaaggtttcagaaatgagaccttcatctacaccaatcaagcgatccacatattttctagcaacatcataggtagaacgcccaaccttttgaacagctatgccatctgcaaatttatcaatatgctctaatttaacagggtgtcctttatcaaaagctgcccgcatgctgcgcgctcccattgcctcaacgccaataacctcaatttcaggagccacatctttaacataggctgatacacctgaaataagaccgccaccaccaacaggtactaaaatagcatcaaagctcaaaccatcttcttgagcctgatcataaatttcataagcaattgttccttgacccgcttgtaccatgtcattatcaaagggatcgataaaggtcattccttcagctttcgtataatcttgggctgcctgagcagaagcatcaaaagtatcacctaccaatttgatagttacaaaggagcctccaaaaaattgaacttgcccaatcttttgatgaggagtcgttacaggcatgaaaatagttgcaggaattttcatttcattacaggtataagcaactccttgagcatgatttccggcagaagcacaaacaactcctctagccttttcttcatctgataattgtgaaatagcataataagcgccacgaattttaaaagaacgcaccttttgcatattttcacgttttaaataaattgtcgctccatatttttctgacaaatagcgatcaaaatcaagtggtgtttgaacaacaacatcttttaagactttgttagcagcaaccacatctttagctgaaatcataacagtcctctttttcaaaatattcaatctatttattataacaaaaaaatcgctaaaatgatatatgggagtctgtttgacattaaaaacacttaacaagcaatattaagtgttttatacgaaacaggaacaaactgcaaaccaaaaaattgataagtagacttcaaatgccactgctgcatcctttaaaaacataaaaaaagctggaacacatccaacttttcatgtcatttattttagttatagattttgaaagcatcgtcatcgttttgattaacaaatggcattgctttacgaagttctgcaccaattttttcaatttcgagtccttcagcttctttacggaaagctttcaaacgtgggaagccagcatcatgatcttccacgaattcacgggcaaatttacctgattgaatatcagcaagagcagctttcatgttttcttttacttctggaccgataacacgtgggcctgtcacaaagtcaccaaattcagcggtatttgaacatgattgacgcattttcttgaaaccaccttcatagataaggtctacaatcaatttcatttcatgaagcacttcaaaataagccaattgtggagcataccctgcttcagtaagcacttcaaaacctgcttcaataaggtgagttaaaccacccataagaaccgcttgttcaccaaaaaggtcttcttccgtttcttctttgaaagtggttacaaggagacctacacgcgcagaaccaatacccttagcccaatctaaagcaatattttcagcattaccagttggattttgataaacagcatataaagaaggtactccaaatccttctgtgtaagtacgacgtacaagatgacccggtcccttaggggcaaccatgaaaacatctacatcttctggtgccttaatataaccgaaatggatattaaaaccatgagcaaaaccaagagccttaccagcacttaaattaggagcaatttcatctttgtaaatatctttttgaatttcatccggtgctaaaaccatgataatatcagccaatttagtagcttcacccacttcataggtatcaaaaccatcttctttagccttgtcaaacgatttcccatgacgcacaccgatgataacatcgtgtcctgaatctctcaagttttgggcatgagcatgtccttgtgatccataaccaataacagcaatcttcttgccatcaagtgctgctacttttacatctgcttcatataacatttctactgccataattaaaatctcttttctaaaatattttttattgccattaaggcaagggttaacaaaattaaagtattaggataaatctctagtaaagcctgtcgctcccgtacgagcgatatttttcaccccgtaaggctgaatgactcgaataagagcttcaattttatctgcatcaccagtcatttgaatggtaatggactttggtgcgacatcaataacactggcacgaaaaggctgaataatagccaaaatctccgcacgcttactcgttggggcagcaaccttaatcaagatgacttcgcgttccaagtgaggtttatctgtaatatctcgaacacgaacaacatcaattaaacgattaagctgcttcataatctgttcaacttcctccaaggagtcaacatcaataataatggtaattcttgaaatattgggaatttcagtatgacctactgagatagactcaatattaacttgccgacgagaaagaactcctgtaaaacgattcaggactcctgtggaattttgaagtttggctgttaacattctacgcattaaaagtcacccccaacatttccgcattactctttcctgatggtaccattggataaacatgctcacggttagaaatatcaacttctatcaacataggcttgttttccaaaataacttccaaatctttttctaaagtcaaaggattgtccaatttataatggctaatcccataagattcagctaaaagttggaaattaggttcatcatcaaaggttgactcactgcgacgttcatcataaaaagattcctgccactgacgaaccattcctaaagaatgattattaattaagacaagcttaattgggacgccataaccatttaaaatagccaattcttgattagtcatttgaaaaccgccatcaccaacaaaaagaacaacctctttaccaggattagccaatttggctcccacagctgcaggaataccaaatcccattgttcctagaccacctgatgtgataatctgacgctcatttttataaggataaaattgagctgcccacatttgatgctgaccaacatccgtaataataatggcatcaccttttgttaatttaccaattgtttcaatagcatgttgcggtttgataacttcttggtcaaacttataactaaatggagccttagctttatcttgcaagaccttatccgtccattctctgtgtcttgtggatactttatcagactctaagagctgttttaaggttttcttggcatctcccacaactggaatagccgtcttaacaaccttgccaatttcagcaggatctatatcaacatgagccacaacagccttttgggcaaaagtcttaggatttcctgtcaaacgatccgcaaatcgcgaaccaaaattgatgagaaaatcacattccgtcaaagccatattggaagcatatgaaccatgcatgcctcccattcctaatgataaaggatgttcaattggcataactcccaaactcaaaagcgttgagacaacaggaatcttataacgttctgcaaaagcaataagttctgcagaagctcctgcataattgacaccgccacctgctagaatcaaaggtttctttgccttttttaattggctcaagattttcttgacttgtaaattatttggctcaatagttggttgataacccggaattttaattgtcgtttcattaaaagaacttactcttttctcagaaacatctttaggtaaatcaataacaactggcccaggacgtcctgttgtcgcaatatgaacagcctctgttacaattcttggtatatcagctgtttcgcgaatctgataattatatttagtaattggcattgtaataccaataatatcagcttcttgaaaggcatctttaccaatacccggagttgcaacctgcccagtaaaaaccaacattgggacactatcactcatagcatcagcaattccggtaatggcattagtcgctccaggaccactggtaacaatagctacaccaagtttccctgttgactttgcaaatccttccgcttcatgcactgctccttgttcatgacgcgctaaaatatgacgaatattgtcttgtttataaatagcatcataaagtggtaagacggcaccgccaggataaccaaaaatagtttttactcctaaatttgccaaagtatcaagaagaatttctgatcctgatttaggattttcaagatatattttttccacagagacctccttttcaattattgttcaaattttcaaaaaattcaaatcacttagtttatatcataacacttttgaaaaattttgcaagtcaatttggcaattattctcttaattttcattactttttccaaaagaaaaaaagccgtcagcaaacgacttgatttcttattctacactcatcaaataaggataaacgggttgatctccttgatgaatctcgacttctatttcttcatgctgattttcaaaatcttcagctaatttttgcgcttgttcttgactaccttcttcaccaacataaatggtgacaatttcactatcttcagcaatcatttttttaaacagttgatgtaagacctgatccatatctggatttgatacaaggatttttccattgaccatacctaaaatatcatctttatgaatatcaaggccatcaatcgtcgtatcacgaacagctctagtaacactaccactgacaacatcagtcaaactttctgtcatagccacaagattatcttcaagagaatttgcggcattaaaggccaagagacttgttaatccttgtggaatggttcgagtctcaacaactgctgcaggaacatcaacaacatctgctgcactctgcgcagccataaaaatatttttattattaggtagaataatgatactttcagccttaacagattcaatcgctttaacaatatcttctgtagaagggttcattgtctgaccacctgagatgatataatcaacgccttgtgacttaaagatttttgccaaaccttcaccggcgacaactgcaataataccaaatttcttcgcttctcgcggtaaatcagcagtggtattttccttttgcacctgagcatcatgttgatttcgcatgttatccactttaactttaaccaaggcaccatacttaaggccttcttgcatgacaagtccaggatcttcggtatgaacatgaactttaacaatttcatcgtcattgacaactaaaagagaatctcctaaattatttaaataattacgaaaattttcgtaattaaaatctttaacataggtaggaccttgttttagcgctaccataatttctgtacagtagccaaaagtaatatcttctgttgcaacatggctggcaacagatttatgatgttcggcattaatcatttctgtcatattagcaggtgtcgcttgaaaatcttctgagataatgtaatcacctgtcaaggctgataggaagccttcataaatgaatacaagaccttgacctcctgaatcaacaacaccaacttcccttaaaaccggaagcaaatccggtgtcttagccagtgctgctttagctccatccaatgccgcctgcatcacttcaaccgtatcatctgtattttcagattttttaatagctgccgtcgcagcaccacgcgatacagttaagatagtcccttcaactggcttcatgactgctttatatgcgacttcaacacctgcttgtagagcctgcgctaaatctttacccgttaattcttccttatttttaatgctttgaccaaaaccacggaaaagttgagaagtgataacacctgaatttccccgtgcccccattaaaagacctttggaaagaatttgtccaacttcacccaccgtagaagctggtttgtctgaaacttccttagcaccgttatccatggtcatgcccatattagtacctgtatcaccatccgggacaggaaagacattcagtgaattgacatactctgcttgtttaccaagacgggttgctgctgcctgaaccattccttggaataaacttgttgtaatattagccactaatcttctcccacaactttaatattttgtacataaacattaaccatatcagccgtaatgcctaactgattttcaaggttaaacttaacacgttcttgaatattctttgacacttcgctaattttgacaccataactcatcacagtataaacatcaactgaaataccagcatctgtcgactttatgacaacacctttagaatagttttccttacgcagaagtgcttgaaaattatccttgagggcacttttacttgccatgccaacaactccaaagatctcattagctgaaccgccaacgactgtcgcgatcacatcattagacaattcaatttgaccatcttttgtattaatttttaccgtcattttgctacctcaaaaagtttttatcagtttattttaccataatatagaaaccttgtaaaaatataggtgtatagattatctttcctaaatatcaagagatagcttgtttatcttgcttaacaagtcattaacccactattgtcaaaccagttttcttcacattgaaataggttgcctacaacttacttagcaagaaatattttaacagattaggtggactgttaaaaattaaaaaacaaaaattctaatcagcgaacgttaatggtactaaagcataatgaaattgatgtaaatgtacaatttaaattttatacagctactttcaaaagagagttggacttttaccttaaattcttgtaaaatgataaaagtaggaggtttagaatgatccatcatcaaagcaccatcatctactgtttattagttctgtggggattaacagaatggtttattaaaagcagaaccaaaaagaatgtctctaatagttctcaggataaaggaacaagatatgttattattgccagtgttgtgctttctatagctatgttaaataatccttttaacattaatatacttctaccagaatggggaatttatctaggcattttgttaatgatccttggtattatctttagggtatatgctatcaattatcttggtaaagcatttacgttaaccgttcaagctaccgacaatcagaaattaatcagcagcggaccttatagtattgtccgtaaccctgcttatactggtactattatttcgattcttggtttagcctttataactttaaatatttttaatattttaatagtttttatcatcttaagtattggttatgctatccgcatccgaactgaagaagaggttctcgaacaacatttcggcaggatatatcaagattattgtcaaaaggttaaatatcgccttttcccatttatttggtaagattagctcatcattgttgtttcctttataccgccaactttagaggataataatcttaacaatccagttgcaacaacttacttattataatatatgcagaatatctcacctaaactgctccaatattgattataaatgacctttcgtatatacttatgaaatttttggatacaaccgcagattgagcacttgcatagcggttgatttatttgtctcgctcctaacggagcgagatggactgaagaactgaaagtcacataaaacaaaaataagcattaactgaactagctcttattccttatcgttataacgatcttcatattactcatctttcataaaaattcaattaaaaacccgtggtgctagttaatcttttagtccacaaaaaagtccatttggactatgctgttagtgatcaaacgaacaggagacatccaaatgaacgacttaaatgataccgctaaacatcatcacttgcaatacagtgtggaacgattaaaaaccatgtgttctattatcggcgttatgcacctaaagaactgacgcaccgtcgaaattcaactattgtaaagttaatgacaatgccattcttgttcttctagtacttcaggctgaactcggcctcaaatctcaacgtcaattctatcagctatgccagatatttcttgtaaaaactggcttagagagaacccgattttattgaagagctcggtatttgattcccttattgaagcttattcatcaaggcatgaccgagccattccatcaggatgatatggtgatcatggatagctttcccctacctgtttgtttaccagctcgcaacgccaaggttcgtagttttagagatcaagcaactgtggcctacaatcctccaaaaaagatgtgcttttacggctttaaagcccatatgctggtgaccttgtcaggatttattgtcaattatggtgtgacgccagcctctgtacatgatcgtcaggtagccgaagacctgcttgagaacacaactttccctgttgttttagcggacttaggttacctcagtaaggttttgaaacagcatttaacccggaaagactaccgtttttggacacccttgaggcgcaacatggtcatggtaaaggctaaacaacataatcattggaggctcaaggctgaaaggagaaccattgaaacgcgattttcagttttatgttctgagtttgacatcgaaaggccattagcgagaagtttaaaggggttgaagctttggttagagcagactatctttgcctataacctaggatttttttactagcaccacgggtacatatcaatatttttctaaacgacctaaagataagagattttatgaagtgacaaataaagaagaattcttttgaggtgatacgttgtttatttcattcgttgattgcattcaaaatattgaaaaaatcgaaaaagaacttctaaagattggaataactgatatccaaattaatcaggatggctatattaattctttatattggctcaaagtaaagcacccaaatgctaataagggagatgccattacattcataaagaatcacgtcgcttgtgattatactgtatcttttggaaatgaaacaaatgttattgaaatgtttctagctagtgatataagcatttgtgttgtaaatgcttataatgtgataaaagatattgctgattatgggaaaatcagtattacgatagcagatgatattttagagttgtttgaaaaggaatatcataggtatttagaaaatgttgttattgctctaccagaagataaaatcattatagaaaagtctgaatatgatgctttgaaaaaacgggacactcaaggtcgttatatgtccatgaatgagcttttagagcttctttcagtcagtcggtccttggttcatagaaaatgttctctataaaccggaaattaaagctcaaattgatattgagaaaaatccagaaggttttgtgaaatatcctaattctcaaggtggcaaatatttatttttagcttctaagactaaagaatattttaaaagccattttagagaaattatgattgacgtatgatatactaatcaaggcaagtcttgattatcgcttttagaaagaggtaaacaatggcaatttcctatagacagcgaggaaaaaagaaattatgggattatagagtctttgatagtaacaaaaaagtaattgcctctaattctggctttaaaacgaaaaaagaagctgaatcggaggcactttatttagaaatgaaactaaaaaatggaactatcattgatagaaatattactttataccagctataggaaaagtggatgactcttcaaattaaaccgttaagaaaatctgattcaactttaaattaacatgaactgcgtggaagatttatacaaaactatttctaagataaaccggttagtgatattaaagccagtaattatcaagagtttatcaatacctatgcaaaaacgaattgtcgagataatgtcagtcgtttaaatgcagaggttaaaaaggttctcgtttttgctagacgtgataaaattaatgttactaattttgttgaaggggtagttttatctggtcgtccttctccaaagaaaaaacaagaaaggtatatccatagtttaaaagattatgccaaattagctctttatttagaaaatcatcttgattatagaaagtctattgttccttatcaattgtatgtgcagttaaaaactggattacgaacgggcgaaatagcaggtttgacttgggactgtgtcctttgggaacaacaggccattaaaacttatcgtcgttacgatactgtaagaaggagatggacaaaaccaaaaacagaagaatctgttagaaaagttccgattgattcaaaagtaataaaagttctagatgatcttcatgctattcaaaaagagtacttagatttgtattatataataaatgatgacaatgtcatttttttagatcttttttatggtattcagagtaataatggtgttaataaacgcttgaggagtattttgaaagaacttgatattgctcctaaaaacatgagtagtaccggtttgagacatagttattgcagcttattgttggctaaaggagtagatatttgggcggttgctaaattgatgggtcatatagatatcaagcaaatcactgagacttatggtcatttggttgcggaaaaggcagaagaagaaaataataaagtgagaaatcttttacaacatttaaattaaaaagatgagagttgaccaaaacaaataaaaaagccttcaaaaaccaatcaacgtttgaagagctaaatactataccggcggccggggtcgaaccggcacgtccttgcggacactggattttgagtccagcgcgtctgccaattccgccacgccggctaatataataacaactggggtagctggattcgaaccaacgcatgagggagtcaaagtcccttgccttaccgcttggctataccccaataatataataatataggcgagtgatggggatcgaacccacgcatgccagagccacaatctggtgtgttaaccacttcaccacacccgccaaaacatattaacacgggcagtaggaattgaacccacactgaaggttttggagaccttagttctacctttaaactatgcccgtaaggtatggaaggggagggattcgaacccccgaacccgaaggagcggatttacagtccgccgcgtttagcctcttcgctacccttccaatgtacatatatgatggcgcgagacggaatcgaaccgccgacacatggagcttcaatccattgctctaccaactgagctaccgagccttcctcttattgcgggagcaggatttgaacctacgaccttcgggttatgagcccgacgagctacctaactgctccatcccgcgatatgtctataaaggaggatgtgggattcgaacccacgcacgcttttacacgcctgacggttttcaagaccgttcccttcagccggacttgggtaatcctccaataaatataatagtccgtacgggattcgaacccgtgttaccgccgtgaaaaggcggtgtcttaaccccttgaccaacggaccaatatattatatgggcacgagtggactcgaaccaccgacctcacgcttatcaggcgtgcgctctaaccagctgagctacgcgcccaagcctatgcttggtttatcttttataaaagaaaagcgggtgacgagaatcgaactcgcgacaacagcttggaaggctgtagttttaccactaaactacacccgcttagatgggagttaacgggctcgaaccgctgaccctctgcttgtaaggcagatgctctcccaactgagctaaactccctcttgctaagcgacgaccctatctcacagggggcaacccccaactacttcaggcgtgctagggcttaactgctgtgttcggcatgggtacaggtgtctcccctaggctatcatcacttaacaagcgtgatcgctcactcacgattgaatagctagccactgaaaccgacgctgcgcctgctttctttaaaaaatggtactcgggctaaatccttggaaaaaagagaaatggtctggtgttcatcaaacactgcacccatttcctatttttcaggcggattttacgcccttagtcacttatttttggataagtcctcgagcgattagtattggtccgcttcacgtctcacaacgcttccactcccaacctatctacctgttcttctctcagggctcttactaactgaacgttatgggaaatctcatcttgaggggggcttcacacttagatgctttcagcgtttatcccctccctacttagctacccagcgatgctcttggcagaacaactggtacaccagcggtaagtccactctggtcctctcgtactaggagcagatcctctcaaatttccttcgcccgcgacggatagggaccgaactgtctcacgacgttctgaacccagctcgcgtgccgctttaatgggcgaacagcccaacccttgggaccgactacagccccaggatgcgacgagccgacatcgaggtgccaaacctccccgtcgatgtgaactcttgggggagataagcctgttatccccagggtagcttttatccgttgagcgatggcccttccatacggtaccaccggatcactaagcccgactttcgtccctgctcgacttgtctgtctcgcagtcaagctcccttatacctttacactctgcgactgatttccaaccagtctgagggaacctttgggcgcctccgttacgctttaggaggcgaccgccccagtcaaactgcccgtcagacactgtctccgtagatgatcaacctaccgggttagagtagccatcacacaagggtagtatcccaacatcgcctccaagtaaactagcgttcactcttccttggctcctacctatcctgtacatgtgtaacagatacgcaatatcaaactgcagtaaagctccatggggtctttccgtcctgtcgcgggtaacctgcatcttcacaggtactaaaatttcaccgagtctctcgttgagacagtgcccaaatcattacgcctttcgtgcgggtcggaacttacccgacaaggaatttcgctaccttaggaccgttatagttacggccgccgtttactggggcttcaattcacaccttcgacaaacgtctaagcgctcctcttaaccttccagcaccgggcaggcgtcaccccctatacttcatcttgcgatttcgcagagagctgtgtttttgataaacagttgcttgggccttttcactgcggctgacttatcgccagcgccccttctcccgaagttacggggccattttgccgagttccttaacgagagttcgctcgctcacctgaggctactcgcctcgactacctgtgtcggtttgcggtacgggtagagtattcattaacgctagaagcttttcttggcagagtgacatcactagcttcgctactaaacttcgctccccgtcacagcttggtggcgcagaactaagcatttgactcagtcctcacctcactgcttggacgtgctcttccaatcgcacgctctagttagcctgctgcgtccctccttcactcaatactctagtacaggaatatcaacctgttgcccatcggatacacctatcggtctctccttaggtcccgactaacccagggcggacgagccttcccctggaatccttagtcttacggtggacaggattctcacctgtcttacgctactcataccggcattctcacttctatgcactccagcgctccttgcggtacaccttctgcgcacatagaacgctctcctaccatcccctaagggatccacagcttcggtaaattgtttcagccccggtacattttcggcgcagggtcactcgactagtgagctattacgcactctttgaatgaatagctgcttctaagctaacatcctagttgtctgtgcaaccccacatccttttccacttaacaattatttggggaccttagctggtggtctgggctgtttccctttcgactacggatcttagcactcgcagtctgactgccggtcttaactcgttggcattcggagtttatctgagattggtaatccgggatggacccctcaatcaaacagtgctctacctccaagagtctcgcgaccgacgctagccctaaagctatttcggagagaaccagctatctccaagttcgtttggaatttctccgctacccacaagtcatccaaacacttttcaacgtgtcctggttcggtcctccagtgcgttttaccgcaccttcaacctgctcatgggtaggtcacttggtttcgggtctacatctacgtacttaaccgcccttttcagactcggtttccctacggctccgtctcttcaacttaacctcgcacgtaaacgtaactcgccggttcattctacaaaaggcacgctctcacccattaacgggctcgaacttcttgtaagcacacggtttcaggttctctttcactccccttccggggtgcttttcacctttccctcacggtactggttcactatcggtcactagggagtatttagggttgggagatgggcctcccagattccgacgggattcctcgtgtcccgccgtactcaggatcctgcttggcatcaagtgaatttcaaatacgaggctcttactctctctggcgactcttcccagagtcttcttctattcccttggctgctttatcgcagtcctacaaccccagagtgtaaacactctggtttgccctcctgcctcttcgctcgccgctactgaggcaatcgctcttgctttctcttcctgcagctactgagatgtttcagttcactgcgtcttccttctcataaccttaacagttatggataacaggcattacctgttgggttcccccattcggatatctctggatcaaggcttacttacagctccccaaagcatgtcgtcgttcgtcacgtccttcatcggctcctagtgcctaggcatccaccgtgcgcccttattaacttaaccttatttctcgtttctctggcttttcagcgtctcggtttcttttttgtttccctatagctgcgctatagggcttttactagctattcaattgtcaatgaaccatctctaggatacttaacatatcctaagtggattttatagacttccttgtcttaaacaagatatgaagttgaactccagactgacttctgtagaaaattagataatcttctacagaagtattcgcaagcgaaccgtctgttagtatcctgttttaatggagcctagcgggatcgaaccgctgacctcctgcgtgcaaagcaggcgctctcccagctgagctaaggccccacttaccctctcaaaactaaacaagaagttcccctaatgtgctttgcgtttttccttagaaaggaggtgatccagccgcaccttccgatacggctaccttgttacgacttcaccccaatcatccatcccaccttaggcggctggcccctaaaaggttacctcaccgacttcgggtgttacaaactctcgtggtgtgacgggcggtgtgtacaaggcccgggaacgtattcaccgcggcgtgctgatccgcgattactagcgattccgacttcatggaggcgagttgcagcctccaatccgaactgagatcggctttcagagattagcttgccgtcaccggctcgcaactcgttgtaccgaccattgtagcacgtgtgtagcccaggtcataaggggcatgatgatttgacgtcatccccaccttcctccggtttattaccggcagtctcgctagagtgcccaacttaatgatggcaactaacaataagggttgcgctcgttgcgggacttaacccaacatctcacgacacgagctgacgacaaccatgcaccacctgtctccgatgtaccgaagtaacttcctatctctaagaatagcatcgggatgtcaagacctggtaaggttcttcgcgttgcttcgaattaaaccacatgctccaccgcttgtgcgggcccccgtcaattcctttgagtttcaaccttgcggtcgtactccccaggcggagtgcttattgcgttagctccggcactaagccccggaaagggcctaacacctagcactcatcgtttacggcgtggactaccagggtatctaatcctgttcgctacccacgctttcgagcctcagcgtcagtgacagaccagagagccgctttcgccactggtgttcctccatatatctacgcatttcaccgctacacatggaattccactctccccttctgcactcaagtcagacagtttccagagcacactatggttgagccatagccttttactccagactttcctgaccgcctgcgctccctttacgcccaataaatccggacaacgctcgggacctacgtattaccgcggctgctggcacgtagttagccgtccctttctggtaagctaccgtcactgtgtgaactttccactctcacacacgttcttgacttacaacagagctttacgatccgaaaaccttcttcactcacgcggcgttgctcggtcagactttcgtccattgccgaagattccctactgctgcctcccgtaggagtctgggccgtgtctcagtcccagtgtggccgatcaccctctcaggtcggctatgtatcgtcgccttggtaagctcttaccttaccaactagctaatacaacgcaggtccatctactagtgatgcgcttgcatctttcaatcaattatcatgcaataattaatattatgcggtattagctatcgtttccaatagttatcccccgctaataggcaggttacctacgcgttactcacccgttcgcgactcaagaaaacacggtgtgcaagcacagtgtgttcccttgcgtcccacttgcatgtattaggcacgccgccagcgttcgtcctgagccaggatcaaactctcattaaaagcttgagtcttcactcatttctgcactctgacagttttttttcgttctttgacaggtcacatttctttatgtcaccctgcactttggttggttcgtcttcttgttcagttttcaaagggctctgcctctttctgagacaacttctttattctaccagctcttcccccctttgtcaatagcttttctcgctttttttctgttttatttcctttatatacctctcttcccctaaaccacgcctttttagtcccctttcgcaacactctagcactgcctccgaaaatacactgatgaacctcttggcttcttgagtgataactttttgcgagaattgccgtctgatgaatttataatcatgattataaaattgcagaaaatcacttttttcaagaagcttctctaattcatctaagttctccaaaagtccaacgtgaaaagcaataggaacaaaggttttctccagtggttgcgtgcagacgcttctaaactcaacagtccctcgttttgttaaattttgatattgatagcttctatgattagcaaaatctgcctcgtctggaagaatatagtgctgttgaccactcaaatcccaagctgagatttcttcctgtcccaaataatcttttacacgaatgggttcaaaatagaggatttctgtttctctttcggctgtaaaaagagctgaattggcaagataattaaaaaaatcttcttctgtttcaaaagatatcttattaacaccgacattctcttcaaaaaccccatgcatagaattttcccaaaaaatatctcgtgaaattttagttgaccaattttgtccccaaaattctgagttagcaaaaaggtaagctttcacagcttcaatcttattaaaagcgttgataactcttaaataattgctcttgctgacatctaattgtacttgattgccacaaataaaagaaccgtattgaggaaaaccatgaaaaaaagaatcttttttatttcccgataaagccaagaaatttaaaagcatttgataacgaggtaatttaacagctctattatcatttaaataccaataaggatgcactccaaatccctgtatagcatggttgtaaggtttgagaaaggcttgtatggctttcatatattgattaaagcgttcttcaatatcctgaatcttttttgctttcccaaaagcaaattctattgtattataagaaacttcaaaaagaattctatcctctgattttctatcaatcaattgcacagggcaaccatcctgatcatatctttccacttcaaaaaatagagattccttaagatgaaacattacagattttgttactgttatatcagttgcctgatggcttaaattaactattggaaactctaattcaactcctatataagactctggtttatcttgaatattatcaagatagcgcttttttaataagtctactgctttagtcatacccttttctcctaaaatatttgaaacaattatagcaaattttgtaaaaaaatcaaaaagcgtttatttaggaaatgcctctactattaaaagtatttcctaaataaacgctgtctttttcaacatgatgagtgttccactaggagcctctcctagtggtagaccagagctagactaagaattattataattccaacatcataacactcaacaaaattgatgatcttatactaattcaataattgccattggggcagcatcaccacgacgtggttcagttttaagaatacgtgtataaccaccattacgttctgcataacgcggtgcaatttctgaaaaaagcttttgaagagcagttgttgatgtgtattcatctttagcttcatcataactttcagatgcaatttcgttacgaacaaatgctgctgcttgacgacgagcatgaagatcgccacgtttaccaagagtaatcattttttcaactgttttacggatttcctttgcacgagcttctgttgtcacaatagattcgttgataagaagatcagtcgtcaaatcacgaaacattgctttacgctgcgagctagtacgtcctagtttacggtaagccattatttcctccctgtattattatttatcatttttcaagcctaaaccaagatctgcaagctttactttaacttcttcaagacttttacgtccaagatttctaactttcatcatttcagattcagacttttcagttaaatcatagactgtattaataccagcgcgtttaagacagttataagaacgcactgataaatcaagttcctcaatcgtacgatcaagtactttctcatcagaaacttgttctgtttctttcatgacatcagtcgccttggctacctcggttaaatcagtaaaaagatttaaatgctcaatcaaaacacgagcagataacccaagagcatcctcaggaataattgtgccattggtcataatttcaattgttaatttatcaaagttatcattgctgcccacacgagctggctcaacttgataattaacttttttaactggcgtatagatagaatctatcgcgagcgtcccaactggtgcatcatctcttttatttttctctgctggaacataaccacgattagttgcaacagtcatggttgcttttaaattagcaccttcagcaatagtaaagagataatgatcaggattaactatttcaatatcactgtctgttaaaatatctccagcagtaatttctgcaggtccttcaacatctaattcaacaatcttttcttcttcgacataagattttacagcaagtccttttatattaaggatgatttgcataacatcctcgcgtacacctgggatagtatcaaattcgtgtagtactccatcaatcttaattgatgtaacagctgcacccggaagtgaagacaacagcacacgacgaagggaattccctagagttgtaccatagccacgttcaagtggttcaatgacaaatctgccgtaatctttattttcatcaatttttgttattattggtttttcaaactcaatcatctattttacccctctaaaacaatcctgtgtactattaacttatgattatacacgacgacgttttggaggacgagcaccattatgtggtacaggagtcacatcacgaattgacgttacttcaagaccagcagcggcaagcgcacgaatagcagactcacgacctgaacctggaccttttacagtaacttcaactgttttaagaccgtgttcttgtgcagacttagcagcggcttctgcagccatttgagcagcaaatggagtagatttacgtgaacctttgaatccaagagcaccagctgatgaccatgcaagagcgttaccatgcacatctgtaatcataacaatagtgttattaaatgttgcgtgaatatgggcaataccagattcaatatttttcttgacacgacgtttacgtgttggtttagccaatttttttacctcctattttattttttcttacctgcaatcgctacagctttacccttgcgagtgcgagcattgtttttggtattttgtccacggacaggaagtccacgacgatgacggattccgcgatatgaaccaatttccatcaaccgtttaatattcaagttaacttcacgacgaagatctccttcaaccttgattgcatcaacttcacgacgaatagcatcttcttgatcagatgttaaatctttgacacggatatcctcagaaacacctgctgctgcaagaatttttttagaagttggcaaaccgataccatatacataagtaagtgatacgactacacgtttgtcatttggaatatcaactccagcaatacgagccattttttctcctttctactttttatccttggcgttgtttgtgttttggatttgtaggacaaattaccataacacgaccgttacgacgaataaccttacaatattcgcaaattggtttaacagatggtcttaccttcatgttttaatccctccatttatttcgattatttaaagcggtatgtgatacgtccacgtgttaaatcatacggactcatttcgacagtaaccttatctcctactaaaatacgaatatagtttttccgaatttttccagatatggttgccaaaatttggtgtccattttccaattcaactgtaaacattgcatttggcattgtttcgacaactttaccttcaatttcaatcacatcttcttttgccacgcaaaagtaccccctaaatttcgatttgatgtcctctgagcacagaggtaacaattataagccagactagcttattttatcactctttgcaataaaaatcaagcacggtgacaggaatttatgacaaatttgctaaaactttagcaattgtctcaaaaactaaattgatatcttgatttccttcaatatcataaacaagacctttattacgatagtattcaattattggatgcccttgagcaatgttgacatctaagcgacgttttactgtttccggtttatcatcttcacgttgataataatcatcttcattataatctgctggtgggttaaagactttatgataagtttcacctgtcttacgattgataatacgaccactcaaacgctccaccaaacaagctggatcaacatcaatattgataacgccatctagcttaagattaagttttgataaaatctcatccaaagcatgagcttgttcaatggtacgtggatagccatctagcaagaaaccttttttagtaatatctgattctgaaagacgctctttaacaataccattggttacttcatcaggaacaagctctcccttatcaataaaactctttgccaaggttcccatttctgtttggttagccatagctgcacgaaacatatctcccgttgaaatatgagcaaggccaaatttttcaacaatcttagctgcctgagtccctttgccagcacctggcaatcccatgattaaaagattcatgatattctccttaattttatttttaaataaatctaccagattggcaaacttattaaaaaacaaaatagaagggagtaagaccaaaacccaaagaaattaaatcattgaatttactgtcctacccccgcatagccattacttttatagaaattctttcttgtaaaaataataacttctgcgcttgataacgccttactacaaagtttaagaaattctatcgctttatattctattctgtaacattcataaaaccaacatattttctcttcaacagatagccttccaattgcttcattccttcaatgcctgtagaaataacaattaacagactggtacctcctaaagcaacacttgatgacaaatcaaattgttgttgagctacaattggactcaaagcaacaaaggccaagaaaatggaaccaatcgttgccaattttttcagaagcgatgaaaggtattcctctgtttcacgaccaggtcgaacactaggaatataagaagcgtttttttgtaaattctctgctgtcttttcaggattgacttgcacaaaagtataaaagaatgagaaaagtacaatgagaacagcataaactgccattcctgttggattagtataagaaagccattcttgcaaggttgtcatccaaggaatatcgcgaccatgttggaaaaatggcaagatagtacttggaatagttgtaatagaacttgcaaaaataacaggaataactccagctggatttatcttcaaaggaagataagaattcgtcggagcaccttgcgccaacttagtatattggattggaatcttatattctgcttgttgaacaaaagttgtaaagaaaataatgatgagactagctaaaatcaaaagtcccacaaaaataagggaattcttcatttcgcttgaacggatattgacaaaataatcttcataaacggatttgatagtccttggtatagatgaaataattcccgcaaagatgatcattgaaacaccattaccaaaacctttatccgaaatctgctctcctagccaagttacaaccacacttcctgcggttaaaatagcaccaattaaaagaaatgtctggacatttggtgtcttcacaagagaaacacttgatagagcactaaatcctgctgtaataccaatagattggaaaaaagcaaggactagtgaaatatagcgcgttgcttgattcagcttacgacgcccgacttccccttgttttccccattcaacaaacttaggtaaaatatccatttgtaaaagttgaacaacaatggaagcggtaatataaggactaacccccatggaaaaaacggaaaagttactcatagcattaccactaacaaggttaagcatatttaaaaatggtagatcacttagttgttcaagacttttagcattgatgcctggtacggtaatgtgtgtaccaacacgaaatacaaagatgataaaaatagtaaagaaaatcttttttctaacacttttcacctttagggcgtcttttaaaagtctaaaaaacattagatcacctcgattgaaccacctttagcaatgatggctgcttcagcagattttgagaatttagctgccttaacagttaattttttagttaattcgccattaccaagaattttaattcctgatttttcagcttttacgataccagtttcaacaagaacaactggtgttacttctgcaccatcttcaaagacatttaactgatcaagattaaccaatgcatactctttagcattgatattagtaaaaccgcgttttggaagacgacgaaagagtggcgtttgtccaccttcaaagcccgaacggatattacctccactacgagctttttgccctttttgtccacgacctgcagtcttaccattaccagaagatgagccacgacccacacggttacgagttttacgagaaccttgagcaggtttaagttcatgaagtttcattttatagtttctccttatttgtaaaatgctagcgcctttataggggaaaaggtgttccctataaaaactcgcctatactaatgtttattacttttaagtcgccaagtgacagacacaaagcgacttaaacctataagatataagctactgattatctactgatgaatcagtcttgcctacctttcaagaaagcaactgtgtcaaaaaatcaagctttcaggatttgaaaagagcttattcgctcaagcacctattaatccatcttacttgcaagactcaattaactttctgcttacttgacatcttctacagttaccaaatgtgaaactgcattaaccataccacgaatagcggcattatcttctttgataactgaactatttaatttaccaagtccaagggcaacaactgttttacgttgtgcaggaatgcgaccgattggagacttagtcaaagtaattttaatctgtgccatgacttctcctttcttatgccaaatcagagactgaaacaccgcgaagtgaagcgacttcttcagcacgtttaagctgtttcaatccttcaacagttgcacgaacaatgttgattggagtatttgaacctaatgattttgatgtaatatctgctacaccggctaattcaacaacagcacgaacagcaccgccagcagcaaccccagcaccttctactgctggcttcaacaagacacgagcaccaccaaattctgaacgaacttcgtgaggaattgttgtgccaaccattggtacctcaatcatgtttttcttagcagcttctactgctttacgaatagcttctggtacttcttgagctttaccagtaccaaaaccaacacggccattacgatcaccaacaactacaagagcagcaaagcgaagacgacgtccacccttaacaacttttgtaacacggttaatcgcaacaacgcgttcttcaagttctactgcattatctttaaatgccattattaagtgtcctccctattagaatttcaatccgttttcacgagctgcatcagccaaggccttaacacgtccgtgatagagatatccaccgcggtcaaacaccacttcagaaatacctttagctactgcgcgttcagcaacgagtttaccaacaacaacggcttgttcagttttagtcccttttgaaacttctttgtcaagagttgaagcacttgcgagcgttacacccgctacgtcatcaatcacttgagcgtagatgcctgtattagaacggaaaatgttcaaacgtgggcgatcagcagttccagagagttttccgcgaacacgacgatggcgtttttggcggattttatttttatctggtttcgaaatcacaattttcacctcttaaattttataattgtcaaattgacagggatgatctaatagtgtttgtaaaatagacaaacattattagatcaatcttatttacctgttttaccttctttacggcgtacatactcaccagcgtaacgaattcccttacctttataaggttctggaacacgaagaccacgaatataagctgctgtctgaccaacaacctctttattaattccattaacaacgatggctgtagcagttggtacttcaaacgtaataccttctggagcctcaacttcatctggatgagatttaccgactgaaagaacaagtttcttcccttgaagttgagcacggtaaccaaccccacgcatttcaagttcctttttgaacccttcagaaacaccaataaccatattgtttaagttagcacgagctgtaccatggattgttttcatttctttggaatcatttggacgatgaagtgttacttctgttccttcaattttaatttcaataacttttgggaactcacgtgtaagctctcctttagggccttttacagtaacaacattatctttattagtgacttctacaccagcaggcaacgtgattattttattaccaatacgtgacatatttattcttctcctgttaaattatcaagccgcctgagcgactagttttcacggggtactcatgatacaaaggcgtcaaaagccaaaatgaaaatagataacttgacgaagaaacacaggtttctaggaaaatttatctttttcacacaggttttaacctatgtttaaatgagtatagttgtttatctattacgttttcaagatactgttcaaattaaactacgttgatttaaacacagtattttacccgtattcaattagttcttcaatgatattaaataactatttagtttaatagttaaactgaacacgctctgagaaccgtgcaaaatagataagtggactttttttgtaaacaaactgctccaacttcctaatttgctttgtcctttacaagctttgtatcttaatattaccaaacgtaagcaataacttctccgccaatatttttttgacgggcttctctatcagtcaaaagaccttcagaagttgaaataattgcaatcccaagcccattgagaacttttggaacatcttcgcgttttgtatagacacgaagacccggttttgaaatacgttttaagccagtgataactctttcaccattttgaccatatttaagaaagatacggataataccctgcttgtcatcttcaataacttcaacatcttttacaaaaccttcacgcttaaggatttcagcaattcctcttttgatgtttgatgcaggagcttcaactacgctgtgatttgcttgattagcattacgaatacgagttaagaagtctgcaatcggatcagtcataaccattaattttttctccttttactagtagtttgaatcagtcacttgctagttatttttcttttgatactttttagaatgacaaaagacatcagcagccgtctacagcgtttcatgactaatgtttgagcctataggttcaaaaccttccttgattgataagctaaccacttatcaatcttttcaccctaacaaaaagtatcagtcttggctcgctagtgctcaccgataagtttgaaaaaagctgaaaactcttttcaaactaccaagaagcttttgttacgcccggaatttgtcctttgtatgctaattcacggaagcaaacacgacaaagtttaaacttgcggtaaacagagtgtggtcgaccgcatttttcacaacgagtgtaagcttgcgtagagaattttgctgggcgtttgctcttagcaaccatagattttttagccaatttaaacctccttattattttgcgaaaggcattccaaggcctgtcagcaattcacgcgattcttcatcagtgttagcagttgtaacgataacaatatcaagaccacggactttatcaacattatcaaagttgatttctgggaagatcaattgttctttcacaccaagtgtgtaattaccgcgtccatcaaatgattttgttgggacaccatggaaatcacggacacgtggaagtgaaactgtcaccaatttgtctaagaattcatacatgcgttgtccgcgaagagtaaccttcgcgccgatagcaacaccttcacgaagacggaagccggcgattgatttcttagctttagtaataagtggtttttgacctgaaataagcgctaattcagcagctgctttttcaagattttttgcatttgacacagcatcaccaacacccatgttaaggacgattttatcaaccttaggaacggccattacagatgtgtaattaaatttttctgtcaatgcaggaactacttcattaagatatttttcttttaagcgatttgccattatacttctcctttccttcgtgattaatcaagtacttcgcctgattttttgttgtagcgaacttttttaccatcaacaactttatagccaacacgacccgcaactccatttttatcaagaacttgtacgtttgatacatggataggtgcttccttttctacgatagcaccttgagggttctcattgttaggtttttggtgttttttaacaatggccacaccttcaacaacaactttattaattttcggaaaagctttaagaactacagcttcaacacctttgtcctttccagcaataacgcgaactttatcgcctttttttacaaacattaagattttctcctattctttcttacgccctgaggcaccctgacaaaaccaggggactatactcacatctatcgttagaccttctcactgaaccttagttaggcctttgtcactctgatttgtctaacgttgattttttgagtactattgtttgtgagttttaaattaaagtacttctggcgctagtgacacgatcttcatgaagttaccttcacgcaattcacgagcaacaggaccaaagatacgagttccgcgaggtgttttatcatcacggataataacagctgcattctcatcaaatttgatgtatgaaccatcagcacgacgagcacctgatttagtacgaacaataacggctttcaccacatcaccttttttaaccgcaccaccaggagtagcttgttttactgaagcaacgatgacatcaccgatgttcgcaaatttacgacctgaaccgccaagaactttgatagtcaggatttcgcgggcaccactgttgtcagcgacttttaaacgactttctgattgaatcatttaagtttttctcctttcaggcttaattaaataatgacagcttcttcaaccacttcaacaagacgaaaacgttttgttgctgaaagcggacgagtttccatgatacgaacaatatcgcctgcttttgcaatattgttttcatcatgagccttatatttctttgagtagttaatacgtttaccatagactgggtggttacgtttagtttcaactacaactgtgattgttttgtccattttatcagacacaacacgaccaactagcgttctacgttgtttacgttccattagatttttcctttcccaatctattctttcgtttctgcttgcacggttttaacacgtgcaatttgctttttcacttcgttcaaacgggcagtttgatcaagttgacctgctgcagcttggaaacgaagatcgaaaagttctttcttaagttcgttttctttcttagcaagttcttcttgagaaagaccacgaagctctttaacaaaatctttaatttcttgaagtttcatgttttctccttattctgcttcacgttttacgaatttagttttaactggtaatttgtggcttgcaaggcgaagagcttcacgggcaacttcttctggaacatcagcaatttcaaacatgatttttccacgcttaactggtgcgacccagccttctggagcacctttcccagatcccatacgtacaccgatggccttagcagtgtaggacttatgaggaaagattttaatccaaactttaccaccacgtttcatgtaacgcgtcatagcgatacgagcagcctcaatttgacgattagtaatccagtgactagttgtagcttgcagaccatattctccaaaagctacttccttaccgcctttagcttcaccacgcatttttccacggaattcacgacgatgtttaacacgcttaggtactaacatttgttatttccctcctttagtgtttttacgagctggaagaatttcgccacggtaaatccaaactttaacaccaagcttaccataagtcgtatcagcttcttcccaagcataatcgatatccgcacgaagtgtgtgaagtggaacagttccttctgaatatccttcgctacgtgcgatgtccgcaccatttaaacgacccgatacttgagttttaattcctttagctcccgcacgcatagtacgttggattgcttgcttttgagcacgacggaaagcaacacgttgctcaagctgacgagcaatattttcaccaacaaggtgagcatcaagatctggtgatttgatctcaacaatattaatgtgaacttgttttccagtcaatttgttaagttgagcacgaagagcatcgacatttgctccgcctttaccgataaccataccaggttttgcagtatgaagggaaacatttaccttattgactgcacgttcaatttcaatagttgaaactgcggcgtcagccaactctttttgaatgaatttacggattgcgagatcttcatgaaggtaatccgcgtattctttttcagcataccattttgcatcccaatcacgaatgataccgacacgcataccaattggatgtactttttgacccacgatgttacctccttatttttcttctacaactacagtaacgtgagttgtacgtttattgattggtgaagccgaacccttcgcacgcggacggaaacgtttcatcgttggtccttcgtttgcgaaagtttcagatacgaccaaattagctttttccaaaccaaagttattttctgcatttgcgacagcagagttaagagttttctcaacaatacgagcagctttgtttggagtgaatttcaagattgcgattgcgtcagcaacgttcttaccacgaataagatcaagcacaagacgtgttttacgaggtgaaacacggactgtacgagccattgctttagctgaagtaatttctgccattgtgtcctcctcctaattaacgacgtgttttcttatcatcagttgcatgacctttgtaagtacgagtcggtgcaaactcaccaagcttgtgacctaccatgtcctcttgaatgtaaacaggaacatgtttacgtccgtcataaactgcgattgtgtatccaatgaaacttggaaaaatcgttgaacgacgtgaccaagttttaattacttttttcttttcgtcattagcttgagcctcgatttttttcatcaaatgctcatcaacgaaagggccttttttaagactacgtcccattttgtaattttctcctttaaatatagtaccacagcggcctatctgtattagaaatacagattaccgagctggcggatgtttaaattttttaagtgattaatctatttttcgttacgacgacgaataataagtttgttagatttagctttcttgttacgtgttttaaggccaagcgcaggtttaccccaaggagtagatggcgctttacgtccaaccggtgccttaccttcacccccaccgtgtgggtgatcgttagggttcattacagaaccacggactgttgggcggatacccttccaacggctgcgtcctgctttcccgagattaacaagtccatgttgttcatttccaacaacaccaactgtagcacgacaagtaccaagaaccatacgaacttcacctgattgcaaacgaacaagaatatacttgccttcttgtccaagcacttgagcagaagctccagctgcccgaataagttcagcacccttacccggtttcaattcaatgttatgaatgaatgtaccaactggaatattagcaagcggaagagcgttccccactttgatatcagcttcagagcctgaaatgatacgttggcctacttcaagacctttcggagcaacaatataggattttacaccatccgtatagtgaataagcgcaatgttagccgaacgatttggatcgtattcaatagtcttaacaaccgcctcaacgccatctttattacgtttgaaatcaattagacggtaatggcgtttatgtccgccgccttgatgacgaacagtaatgcgaccgttattgttacggccagccttgttttttaatgaaacaagtaatgatttctcaggtgtgcttgtagtaatttcagcgaaatccaaagaagtcatattacgacggccatttgtcgttggtttgtaaactttaatacccacgttatttcctccttagattattctgcctcagcagctgcaaacaagtcaattgtcttagaatcagctgtaagagtgatgatagcttttttcgttttgcttgtaaaacctgtataacggccaacgcgcttttgctttggttttacgtttactgtacggacacttgctactttgacaccatcaaaagccgcttcaacagcttgtttaattaaaagtttatgagcgcgagtgtcaacctcaaatgtatacttaccttcttcaagagcatgcattgatttttcagtaacaacaggttttttgattacatcgtacaaattcattatgcaagaacctcctcgatattagagattgcttctttagtaacaagaagtttgtcgctgtttacgatatcaagaacacttgcagttgctgcggtagcaaccttgacatttggaagattacgagctgacaactcagcagcttgattaccttcttcaagaataacaagtacttttgaatcaacattaagtgcagcaagtactgtagcaaattctttggtctttggagcttcaaaagaaagagcatctacagctacaaatttttcatcagcaacttttgctgaataaactgactttaaggcgagacggcgaactttttgtggaagtttatagccatatgaacgtggagttggtccaaaaacaacaccaccaccacgccattgcggtgcacggatagaaccttgacgtgcacgtccagttcctttttgacgccatggtttacgtccaccacctgatactgctgaacgatttttaaccgcgtgagtaccttggcgaagattagcacgttggctaataataacatcaaatactaccgattcatttggttcgataccgaagatagcgtcgttaagtgttacttcaccagcttctttaccagtttggtcaaatagttttacgtttgccatgttaactgatttcccctttctttattatttagcagctttaactgctgatttgatgatgataagagatttcttagcacctggcacattacccttgataaggataacatttttttctggaacaacttgaacgatttcaaggttttgaatcgttacgcggttacctcccatacgtccagcaaggtttttacctttgaatacacggttaggtgctacaggtcccattgaacctggacggcggtgataacgagaaccgtgagccatagggccacgtgattgaccatggcgtttaatggcaccttggaaacctttacctttagttgtaccagtaacatcaacaacatcaccagcctcgaattgttcgactgtaatttcttgtccaacttctaagccttcaatgtttttaaattcacgaatgaagcgcttaggagctgtgttggcttttgccacatggcctttggcaggtttgttgctcaatacttcacgtttatcatcaaagccaacttgaactgcttcgtaaccgtctgtttcaacagtcttaacttgaagcacaacatttggagttgcttcgatgacagtaacagggataaattcaccagattcagtgaagatttgagtcattcccacttttttccctaagattccttttgtcatgagaaaatatttcctttacttaaattatttaaaaagttttttatgagcgttttttatgctcaaaaaagtttttaacgagcgttttttgtgctcaaaattaagatactaagagcgtcaaactcaatgtgaaaataggaaaatcgatgacggctcgacaagcctaggcgattttatctttttttacgtagagtttagcccgtgttcaattccgtttgaactggttcttaatatttgattaaagtttaatctctacgtttacaccacttggaagatcaagcttcataagcgcatcaactgtcttttgcgttgggttcacaatatcaatcagacgtttgtgagtacgcatttcaaattgttcgcgagaatctttgtatttatgagtcgcacgaataactgtgtaaagactgcgttcagtaggaagtggtacaggaccagcaacgcttgcacctgtacgagtcgctgtttctacgattttttctgccgctgtgtcaagtgtacggtgttcgtaagctttcaaacggatacggatttttttgtttgccatcttttctcctctcgtctatttaaaataataggctagctccacaagaaaaccgacaggcttttgcgtggcaatgcaaccgagcgtatcgcaacctcttgtatcaaagctaaaggctgatttttacagcaccaaatcagtataacaaataaacctttttattgcaaggccatttcgacgttttttataaaaaactctgaatttcaatttaaagtgttaatcagacaaaaacaatgatataaataaaagtcattcttacttgcttttactagttaaaaatgataaactcataattagtttataaactaattatgaggagtatatgttttcaagtcaaaaattaaaagaaagacgaaaaaaacttggtctttcgcaagcacaaacagctgataaattaggaattagccgaccttcttattttaactgggaaattggcaaaacaaagccaaatcaaaaaaacttagataaattggctcacttattaaaggttgattctgcttactttttatcacagcacgatattgtcgaaatttatacacgtttgaatgaaagcaataaaactaaaaccttaaaatactcacagcatttactagaacaacaagataaggaaaggaatctaatgaaaaataaacgttatccctacagagtttacgaaaaattatcagcaggcacaggctattcctattttggtgatggcaattttgataccgttttttatgacgaagaaattgatcacgattttgcgtcttggatctttggagattcaatggaacctatttttctcaatggtgaagttgcccttattaaacaaacaggatttgattatgatggcgccatttatgcgattgattgggatggacaaacctatataaaaaaggtctaccgtgaagaaacgggccttcgtcttgtttctctcaacaagaaatacgctgataaatttgctccttatgatgaaaatcctcgaatcattggattaattgtaggaaattttatcccccttgaaggctaatgactctgcgtaaacttgaataataaaaagtacaaaagaatttactgagttacacctcacaagttagacaaaagatctaaactatgaggtttttttcatgcaatcaaaaagactctataaatcatcagaaggagttcacccacttcagatattataaagtcttttgttttgtatatataaagaaatgctttatttaaaaccaatgcttacacagaaagcactgaaaagagctaataaagctgcaaagaaagaatttccttttttctgtttcttttctgttgaaacatgatgagctttctttgtttcttttgtgttattaatcgatttttgagaaggtttgacagaaatatttccgcccgcagagacattaaaggcaacattaagagacccacctgaattccttgattggtcaattcgaccagcggagtcattatttactttgacaggtttaataacgagatgaccatcaaaagagacttcaaaagaaataatgtcatctgtatgaattggtgttgatggaacagttggttgatattgtcccggtgtatgtggcttcaaaccgtagccaccaataacattccaatcaatataaccatcattttcacctggaagataggctgtatccagcgtgccaacagtgtctgtcgtgcgacttgattcatcccaaatccaatcaccctgttgtgtcatttctgctaagacttttgtagtcccatctggtaaaacctgaatcagaaaactaggtgcccaggttgaattcttacctttacctgcgacttcattacgattggtcatataagccgtcattaacagggtatcagatgatccagctactggaacagcataataagagtaagtcgccgttcgccaatctgctggaactgaagctgttaaaaccataccactattatttaagggtttgtagccgttagtcaattgatcagaaacataacctagcataacgacattatcaccaacaacttcatttgctttattccaagcatcgttgttacttccgtgattaagacgtgaagctgtaaaaagatagtacttatctcctaatttaaccacattggggcgctcgagttcatccgaaaccattgttgaacttagtaaaggcgtgtaaaactgatctacctcaggtgtttttttatcgcccttaagttttaaaataccaatagctgcattggcccagcttgcacggttatacatatcttgatcatctaaaagtctaaaaagacttttaacattataagcagagctgccgccatagttagtaaagttgtaaatctgatcttcaccttgataattctctgtacctgtactagcctcaaagacaagatagcgatctcccttctcatcttcaatgacatgtggatcacgcatagcaatattatcagcacctgtaaaggttgaacgccattgttgataactttgataatgatagccatcaccgccttcaggcgttaaaactttatcattttcaacagaaagaattctaacatcttggtcatcaaagccaagatttacagtcgctgttgctaaacgttgattattactgtttttgtcactagtatcaaccttggtgtagaataactgcaaactaccatcttcatttacggtagctgaacctgaccattcttgagttaggggtgtttcattataaccaaagatagaacctgcatttttccaatgatcaaaattattatctccatatttattataaagaagataaatatgattatcattagtatttggaatgcccatcatagcaacaacaagctgataaccattccaattaataacttcaccagtcttagcatcctgaactggccacgaatcccaaacatccaaatcagctatttgacccgtttgggcatcacgcgttgtagccgccttcatatttttgattgcttttgcattaaaataagggatagcatagcgttcatcttgagctatcaacgtttgagcaatcttgtcaaattcttgataggtcatttgatgacccgtttgagcatcactcgttaatttaactttatttaatgcttcaacttgcttttgtgtcaaactgcttaaattaataccagcttcagtcgcaatcttacgagcctgttctgttagaccatattcatctattgtattctttggcgtagttatgtcagcttctttagttgccttagccttttcatttgtttgacccacttccggtgtactagctgatgttttagttacggtagctgcttgatccttagttttactggcttttgattcaacagcagcattatctgttatcaccttagttgtttgatcagtattctcaacagtagcagctgcgggatttgttgatggtgtttctttaacttcagtcttatcctgattttctgctgctgatgatgaagcagttgtattttcttgaacctgacttctttcagccaattctgaagaaacttgagttgaattggcttcatctgcctgaacagaagagagcccaattccagtcagcatagcagttgtgatggtggctaccacccaaaatttccctttcttatacatcttttttctaactttagtttccattagcaaacctccttttttattattgttacattataatcctaatttataacaaacacgatatcatttatgttaatttttagaaacttttttatgaaaaaattgttttttcataaatttcatctcattttcatgacataaaaacaaattcacatattagattaagctgaaattaaaaatatctcttgaaccaaaaaacaagagatatttttttataatcttttaatattggggacactgaagtagggtaaagcgagctaacaaatttatgaaaaatagactagataattatacaatatcaaattttaatttttctttttgaatacctattttcagagtctgtccactagctagttttcccgaaagaataagctctgctaacttatcttccacttctgtctgaagtgtccgacgcaaaggacgtgcccccatttcagcatcataacctgccagagctaaatgtttcaaagctgaaggctgaaacttaagtgtaatcccctgatcagccaaatgggcaatcaatggagcaaccataattttaacaacatggcgtatgtcttcttgaccaaggttatgaaagacaactttttcatcaatacgattaataaattcaggtcggtaaaccttttttaattcctctaaaatacgactttccatggccttataatcctgagaaaagcttttagctccaaaaccaacggttttatcatcacgaagcgcagtcgcacccaaattagaggtcatgataataatcgtatttgaaaaatcaactttgcgaccacggctatctgtcaaaacaccatcatcaagtacttgaagtaagatattgaaaatatctggatgagctttttccacctcatcaaaaagaagaacagagtaaggtttgttacgaaccttttccgtcaactcaccgccttcttcataccccacatagcccggaggagctccattaaggcgagaagctgcaaatttttccatatattcgctcatgtcaaaacgaataagagctgactcatcatcaaaaagcacttctgccaaagccttagcaagctctgttttaccaacacctgtcggccccaaaaacatgaaagagccaatgggacgtttgccaacccgaattccggattgattgcggcgaatagcacggctgatactggacaccgcatcgtcttgaccaattacacgcttatgtaattccctttcgagattaaggtactttttactgtcagcctgtgttaattttttgacagggatgcctgaaagtttgctgagagtagctaggatatcttcttccttgacttcagctcgttttttaagtagaggcttcttctcctttttcagcaaacgcttagctaattggtaatcgttagtgataagagcatgatctaaatctgtcaaataagctggtgccttttttttcactaagccttgaacagttgcactagcttcatctaaaagatcgatagccgaatcaggtaaatttttaccatttaaataacgatgtgctcctttgactgccgccattacggctgcatcagaaataataacatgatgataagtttcataactcttctttaaaccaagcaagatctgataagcttcttcttcacttggttcttcaatagttaccttagcaaaacggcgagaaagagcagcatctttttcaatatgcttttgatactcctcttgagtagtcgctccaatcgttctaagactgccgcgcgctaaagctggtttaagaatattagcagcatccagcgtactatcaataccacttcctgaacccataatggtatgcagctcatcaatgaagaggacaatgtgaccatctgcttcaatgtctgcaataatttgattcattcgttcctcaaaatcgccacgaaaacgagtccctgcaacaacactcatcatatcgagctctagtactttcatatctgccaattcaaaaggaacggcactatccacaatacgttgagcaaggccgtaagccaaggccgtcttcccaacaccagcatcgccaactaaaacagggttattttttgtcttacggcttaaaatttgaaccatccgtgaaatttcttgttcacggccaataacaggttctaaacgaccttgtcttgccaactccgtcaaatcccgtgtaaaatcagctagttcacctgtaacgctaggtggcttcattaaatcagaaaagctgctgctatttttgacctttttaggtttacgcatttcaaagatggccttaatgtcctctttggaaaagccagcataacgttcaatcacttttcgcagatccaaaagacggatggactctccatcatctttggcgtgaaaaccaactaattctaaaatgcgagtcgccaaaagattaggattcagtaacatagcaaagagaacatgttctgtgccgacttctttagcgtgtgtcacctgactaatagcagcggcctctgctagggttcgttttaaagcatgtgattgctctaaaagcataatatcattactcgaggacttaggctttttaccaatcgccaaaatagcagcagcctgataatcctcaaaacggacatctgcttcaaactccgcaaaacttaaaccagccactgaggaatcaatctctaccattgcaagaaggacatgccagctttctaaataggaactttcaaaacgagctgcttcaaactgcgccaatcgaaagacttcctgcatttttaatgagtaatcggtcatagatggtatccttttctatctaaacgttgtaatattttgcgaagcatacgggcacgaattcgagagctctcttctccaagaacatcatctcctgaactcgccaaaataatattcccttcacgctcgctaataattttctcatcaaagagaagttgaataatatctgtaaaaacttgctcgctaatttgttcaccaatagtcgcttctaaatcattgagcatctggtgttggtctgaaaaacggattttagcaatcctaatataaccgccaccaccacgtttgctctcaacggcataaccacggctctctgtgaaacgcgtcttaatgacataattaatctgactgggaacaacactaaaattatctgccagaacacttcttttgatttccgcgaagcccgactgtgctaagatttttttaatatattcttcaatactgtctgaagtattttttgacgtcatgcttccaactccttcccagtcactttgactataactgaccttattatatcgaaaatttgtttttttggaaagccaaaggaaatctagttttaaaaaatatgtcgtttactgattcatattttggataaaaagtctaccatgtactttacaacaaagtataaagaatttaaatctttaaaagtttaaaacagtacaataaaaacgactttcagtaacagcactctaatgttagagacaacattctaactttggagtactgttcaaaaagtcgctttttattttatttattaagagcagctgccatggttgcagcaacttcattttcaaaatcgttagctgctttttcaataccttcgccgacctcaaaacgaacaaagctaatcactttcccatttacggattccatataagcttcaacagtcttactgtcatccataatgtaaacttgtgataacaaagtatattgttggtcaaccttcgtattgtccaagaagaagcgagccattttaccaggaatgattttatcccaaattttttcaggtttgccttcagctttaagctctgccttgatatcttcttcagcttgagcaacgacttcatcagttaattgaccttgtgaaccgtatttaagaagcggaagagctggtttatcaaccatagcgcggctttcattatcttgttcaattttatggttcatttgagccaattcatcatgaataaattcttcgctcaattctttgtatgaaagaacacttgggttcattgcagcaacatgcatggcaagttgtttggcaagagcttcatccgtattttcaccttcaaggaccgtgacaacgccaatcttaccaccattatgctggtaggcaccgaaaacttgtttatcagctttttcaacaagagcaaaacggcggaaagaaattttttctccaatggttgctgttgcattgacataagcagcctctaaagtatctccagctgctgtttttaaagcaagggcttcttcattgttagcaggtttaccttcagcgataactttagctgtttcattgactaagtcaacaaattgagcatttttagcaacaaaatcggtttcggcattaacttccacaatagcggcaacattgccatcaacataaacacttgttaaaccttcagcggcaacacggtcagcttttttagctgctttggccatacctttttcgcgaagaagttcaactgctttttccatatcgccttcaacttcaaccaaggcttttttggcgtccatgacaccagcaccagttttttcacgcaattccttaacaagagctgcagtaatatttgccatgataattcctccaaattttaataaaaagggagggcttagccctgccctttaggattttttcaatcattaattttcgtttgcgccttcaacaacttcaacaatttcttcaattgaatctgcttgtgtttctccagctgcaagttctgcttcaacagcttcaacactgtcttcaccttgacgaccttcaatcacagcatcagctaatttgctggtaatcaatttaacggcgcggatcgcatcgtcatttgctgggataataacatcaatatcgtctggatcagcattagtatcaaccatagcgacaactggaattccaagtttcttagcttctttaactgcaatttgttctttgtgcggatcaacgatgtagataatatctggaatacgaggcatatcttcgataccacccaagaatttttcaagacgcgcacgttgcttattaagaagagcaacttcttttttaggaagaacatcaaaaataccatcaacttccatttgtttgatttctttcaaacgtgcgatacgtttttgaattgtatcccagtttgtcaaagtcccacccaaccagcggtggttgatatagtattgaccagcacgttctgcctcttctttaatcgcttcagaagcttgttttttcgtaccaacaaacaagataacagcatcatttgctgcagcatcacgaacgaagtcgtaagcttgatcagctaattttacagtttgttgaaggtcaataacgtgaattccattacgttctgtgaagatgtacttagccatcttaggattccaacgacgcgtttggtgaccaaaatgcacaccagcctcgaggagttgtttcattgaaataactgccatgagtatttctccttttatgtttttttgcctctctcagacttcaacttgcaatctaacccaaaaggcaacgagatcacaattcatctaagatgagtatttgctgcttacacagctctattagcataacaaaaaaattgaattttgacaagtccgtttattattactgcatacagattaaatacttttttattagcttattttttgctttagattttcatcaacatactgtctgattttcttcgaacataggatgatagtttctcctattttagataaaaccatccataattgctgtcgaaccttcctaggaagccaagctagaatttctatagtgtatccaatacactgtacaaatgtctttttgtaagctatttgaacatgtcctgaatgtgatacagaaatcgtagcaaaaccattatataaggctttttctgtcaccttaggttttttggccttagaatattgagctagctcttctttcgataatttttgatagattattttaggctgtgttccgacagcttcgtcgctatagtacgctttataacccttataccaaattctcggtacaacaattgtctgaggttgattgcttttaagcgaaacatcaaattctaaatcattatatttttgccgaacattctcaatagctacctcctgctgattataaagaaactgattgaggcttaaaccatttcgcatatcatcatgattgacagaaagattgagatactcatctccactagtatcataagatagctgaagcggatttttaaatgcctttacagcaaaggtattggtgttttttaaatattctatactttctcgatattcttcataactatatttataaggctgtgttactatataataaccaaattgaaagatacagattgaaataacaaggtatttattaaaagaaatacacgctgccatcaagacatatattggaagaaaatacaccaatctatttgtatattgaaaaacacctaaaaaactatactttaatattttccacggaattaatgttgtggttgagaaaagcaataagagtgacatcaaaataagctttcgagaaacgcttttaatccaaaaactagataccaatcctataacgataataactatggcaattggaaattgatagttgataatagcatctccaacactatttggaagcattaaaatcttagctggaaatggaaaatctcttattatccaagatacaaaaaaagtttgagattgagtttgctctacatattgaaaaatatagccactagtcataataagacctataactaaagacaaggagaatgaaaaaagtttttgtcgtgttagctggttactatttaataatacaaatatagcagaagcaattcctagcactattgttgatatcacatgtgtttgaatgagcaaagatataactgccgctagcaacataggattgtagcgttcactatatatgaccttatacaggctataaaataataatggtatcaaaggaatagcagccaccatcccatatccaaaaaatggtatggtaataggcagtatcaaggcaaaaataaaagctcgctttctacttttactcatctgatataaggaataaaaacctgtcagagaggaactgtagatgagcagaaaagcatacactgagtatgcaaacgtggccgtttttgttgctaaaaatacaagagccggaatataaagctgccaattcccataaaacatggttacagcatagccagagttattagctattacataatttaaattagggagccagtctccattttttagagattgagctaagccgactattctagacatatgaaacgaataatcatacatccagctaccgcggtttatagaaatatatgatatataagttattattatggcatagattaaaaaaacaatactatatgataaataactgctaagcattaaagaatcgtcattggaatcgttacctgaatttttaatttctttattgctttttaaattatctaaaaaacgtaaccgaaaatcttttatcatttttctccattggatcgctgtaacattctcttcataactttataatttttatgcagatgattgccaacctttcaatcgatttccttatccgcatcttgttcaagaattaacttctaatattatagcacattataaaaattaaaaatgcttattttagattttatctggttttttacctgtataattataaccgcatttaccctatcagcaattaagacggtagtgataggaaaaaacttgacctgactgattttttaaggtaaaataaggaatgttatggcggtatagccaagtggtaaggcacggctctgcaaaagcttgatcgtcggttcaaatccgtctaccgccttttgtaaaaaatctcctagtccaactaggggattttttgtatcgaaacgaaatattttaaaataattgttatttttgtcctcaaacagtaatcaaaatgataaaataagtaatagaaagatgttactgtaaacaagcccattttaagctctacagaattcaagattatttcttttattagcgaacggaataagctttaaaagaggcttctcgctgtgagaaaaggtgacagaaccgttgatgtttctgccacttggaagagtttcaaatcttaggtatggaatttcaaaagaagtcgctactgttcttatcatctaaggaaagccttaaaagaagattttcttgaatctgtatagagaccttttaatactgttgaaaaacattgctaacaataacctagaaaaaatgtcacatttaggggattacttatggggaggaaagatgaatgaaaaaactaacatatggtgatcatatcagagtgcttagtccatcaaattctattgaaagtttaggtggattcaatgccaatttatcggctaagagaagacttgaaaagttaggctttacagtttctttttctaataactatatggaaaatgatctgctcaattccagttctatcgccagccgtgtttctgatattcatgacgctttcagagaagaacatgtcaatgccattctctcaacaatcggtggttttaatgctaatgaaatcttaccttatttggactataaactcattaaaagtcaccctaaaattatctgtggttattcagatacaacggctcttttaaatgcgatttatgccaaaactggaatggaaacttacatgggaccgtcttactctagttttaagatggaagaaggtcaggactatcaaagcagaatgtggctaaatgccgttactagacacatttacaacttagtccctagtgataaatggtccagcgacccttggtacgatcctagccaaccacgtcattttatgcctacagaatggaaaatttataataatggcaaggctgaagggatagccatcggcggccatttagccacctttggtcttctacgtggaactgaatttgctcctaatcctgaaaattatatccttttcttagagggatctgaagaagaaaatcctaccgaaatttctcgccatttagctgctgtcctacaaacctactctaatcctcaagccattatttttggacgttttccaaaagagtgtcaaatgaccgagaaaatttggcatttcatccttgataaacatcctgttctaaaacaaattccagtcatgtatgaccttgattttgctcatacacagcctttgtttacctttactatcggcgctaaggtcactattgataccatttccagagctattcaatttaaaacaacataaattaagattgaattagaacaaattttgtctaatcggttatctagtcaatgaaaaaacgcttgaaaattttaattcaagcgttttattttagattttttaatataataaagcgagttaacacatcataaaatataaactagatatctaccaaataataacacgtttatcttcatcacgccacatgccatcaccttctttaaccgcaaattcttggtggaattcgtcaaagttggtaactgtaacattggtccgccatttagctggagcatgaacgtcaatacttgctagcatttgcatatattcgtcgcgtgctttcatgcgccagatcgttgcaaaattaataaagaaatcacggacagaaaaatctgcttcacgtttggcagcttcaagagcacaggcaaggccaccaagatcagccacattttccgaaacagttagctgaccgttgaccttagcaccataagaatcaagtccttcaaactgttcaacaactctgtctgtacgctttttaaaagccgcataatcttcatcagtccaccagttgttaagactgccattttcatcaaaggaagcgccattcgtatcaaaagcgtgagagatttcatgggcaatgacagcaccaatgcctccgtaattagcagatgaagattgctccaatgaataaaatggtgcctgcaaaatagccgctggaaagacaatttgattttgctgcggatcatagtaagcattaaccatgtgagctggcatatgccattcactgcgatcaactggttgattccacttgctccaattataggcaattgagattttagccaaattttgagcattttccactagactgagattgtcgtcaataatcttttgagcataagtcttgggtaattgttctggataaccaatatgaggcgttatgacattgagtttggtaatagccttattacgcgtttcttgagccaaccagtccgtcttatgcaaacgttctttataaacctcaatcatagttgccactttagcttccacatctttctttgcttcaggagaaaatttctcgccagcgtaccaaagaccgagcgcttgattataagggccctgagccagataaaaagcggcttttttcttacccatagcttgaggtgtccctgaaagagcacgattatagcttcctgaaaggatacgaatatcatctgtcaggtaagaattgtaagaacttgctgcagctaaaactaaggtagcttttaagaaaggccaatttttttctgaataaaattcagctgcaaaatttgtccaaaaacgctcttcaggaacgataactttatcaggtttttgacctaaaatctgtgtaaaaatcgcatctaaaggcagttctggtgttaatttggtaaaatcagcccaatcataaggatggtaaagcttcacatattctgatgattcctcactggaaagaacatattgagccaatttggcatctaaaataagcaccttatctagaagatctttaatttctgcttcttcaaaaccaaacttaggcaaaagttcctcttgcattgcacgccacttggcaagcagttccttacctttgtcattaccttcagcataataagtggtatctggtaaaataagatttggagcctcggcccaaagcacattcatttgtgcattcataaaatccggtgccacaccaaaaggaagctcattaggcttgccagccatttcataagtggctatgttggaagcaaaatcagcaaaagaagttagactcttatattcttcaatgagaggcagcactggcttaacacccgcctcttcacgcgcatcatagtccgccacctgacgatggaacttcacaaaattttgtaaaatactatcatcaggaacatcgttcccatctagccacttgtcagtggtctctaacattaaatcttcaatgtcatcagccaagtccgaaaaaccacccgtccgtggtttatcatcaggaatgaccgctgcctcttcccactggccattgactgcgttataaaaatcatcttgtaaacgtaccataactattctccatttctatacgctttctattgtaacaaaaaagtccgatttaagcagtgtcggactttgaagtttttttctttgctagatactaaccaatgccttcacattagcaacttgcttcatatcatttacaataccctgcaaatcatgacccccagaattgataataatatgttctttgcctaaataaactgcacctaaattacgagcaatgttgtttagccaatctttttgtgttgtaattctaataacgtttcccgtaaattgcctttgatcattcttaatatctgctatcgttttcttggcttcttctttatttgagggtaaatcgaaatttttacgaagagattcataaactttgttgccaagataagcaatagcaggaatataaagcggatctgaattataaacgactatagtagggcaatgttattaacttagattaacttaatggcattgactccataagcttccttttattcctccttatagtaatagattcttatcagacttctgctaaaatcgctactgtctgatagggttttaaaagaattttatctgtcaggacgactttctcgtaattactaatgagaacagtccctgcttgataaagggaaggcaagtctagctcaactgtttcagcaaagaaattattgagaaccagcaacttttggccttcgtactctcgttcaaaggcatagattttatcactgtctgtcaaagctgcttgataactgccttgagcaattagcggcatttcttttcgcaaacgaatcaatttttgataaaaaggaaagatcttaccttgtttttcattagccacattgatttgcggatagctctttccaaccttcagccacggcctgccagttgaaaaacctgcattctcgctagcgtcccattgcataggggtacgtgcattatcacgcgatttggctcgaataatgtgaaaggcttcctcagaagatttgcctttatctattaattcttgataggcattcaggctttccacatcaacataatcagccatagaatcatagtctggatcaatcatgccaatttcttcccccatataaatatagggcgtaccacgagataaatgaatagaagctgcaagcatggtcgctccttcattgcgaaactgcttaatatcaacaaagcgattaagtgctcgtggctgatcgtgattattccaaaagagagcagaccagccgttaccttgactcatcccttcaccccaagtatgaaagagatgtttcagttcttcaaaatcaaacgttttgcgtgtccatttttgaccattttcataatccactttaagatgatgaaaattaaagaccatatccaattcatggttgtcgggattgctgtattgtatgcagttaggaatgtctgtaaaactcatctcaccaacagttataccattttcatcctgaccaaagctggctttattgagcatttttaaataatcatgattaatgggacggtctgtatattcaggtttcccatcaaaatgaggattatcctttaggacctcgtctttcccaatcacattgataacatcaaagcgaaagcccttgactcccctgttgcgccagaaattgaccaccttaaacagttcctcacgaacgtgaggattgcgccaatttaaatcagcctgcgtgacatcatacaggtgtagataatatttccctgtatccccaaaaggagcccatgcattaccgccgaatttagaaagccaatcagtaggcctatctcttaaaataaagaaatcctgataatacttatctccagccaaggccttttggaaccattcgtgttctatcgaacagtgattgagtaccatgtccagcatgatctcaatgccatgctcttttcctttacgcgataattcttcaaaatcggccatgctcccaaataaaggattcacagcagtatagtcagacacatcatagccgttatcgcgctgtggactagggtaaaatgggttgagccagataacatcaattcccaattcttctaaataaggtaatttttcaataattccctgaagatccccgaccccatttccacttgtgtctttatacgatttgggataaatttgatagacaactttccttttgtctaatgtcattttattctccttacaataattgatcctatattttgcttgctgttaagaggacctcaccgcgttcaatttcacgaggaaggcttccaacgacatcaggctggtagtcattttgattggtgacaataacaggtgtctctgtagtataacctgcctgatggatagcatcaatatcaaaacgaatcaatttgtctccgaccttgatcgtatctccttgtttgacatatgtttcaaaaccttttccttccagattgaccgtgtccataccaatatggatcaataattcaagtccttgatctgttacaagaccaatagcatgttttgttggaaagaggacagaaaccacaccattaacaggagacgttaagagaccttcacttggatcaatcaaaacaccttgtcccatgacaccttgggcaaaaacaggatcaaccgcttcagacaaaggtttgacttgaccctttaaaggacttttaatctcaaacgttgttcctacagcaggttcattagtcttttctgatgctgatatttcagcagtttctgttttttcttgatgagcttcatcttcagatttagtgagaaagttaatcctacggaagaaaactgttaaaaccataggaactgcgatagcaactaacataatgatgaaaaatggaagcatatatttaactttgatagacaaaattcctggaagaccaccaataccaatagcattagctgttacgttaaatgtgactgaaaggaagcctgcaatagaagagccaatcattccagctacaagaggataaacatatttgatattcaccccaaaaagtgctggttctgtcacaccaagataagctgagatagtggctggaagtgaaacttgtgcttcacgttcttcatgacggttcataagataataagcaaatactgctgatccttgagcaatattagaaagagcaatcattggccatagtcctgtacctcctgtatctgctactaattgcgtatcaatagcattagtcatatgatgtagaccagtgataacaaatggcgcatagagagctccaaagatagctccaaaaagccacttaacaggaccggttagacctgcatatacaattgttgaaatccattgtccaatagtccagccaattggccccagaacagtatgggctaaaatcaatgctgggataagagataaaaagggaacaaaaatcatggaaaccacttctggaattttcttgcgccaaaagatctcaagatacgaaagagaaagtccagctagtaaagctgggataacttgcccttgataaccaatacgtctcaccgtaaagaaaccaaaatcccaaacccattttttagcgatttcagctgcgggcgtactagctacattgtaggcattcagcagctgcggtgaaaccaaacaaattccaagtacaatacctaaaatttgactcgttcccatcttacggctgacagaccaaacaatacctacaggtaaaaattggaagatggcttcgcccggcagccatagaaatgaactgataccactccaaaattgtgaatgctgtgcgattgtttgtccatctagaaatccccattgaacctgatcaatgacattacgaaatccaagaatcagccccccaacaatgatagctgggataataggggtgaaaatttctgctaacagagtcatcacacgctgaataggattctgatggcttttagcagctgacttagcggtttccttagagaccccttcaatacctgaaacagctgtaaaatcattataaaacaaaggaacatcattcccaataataatttggaattgccccgcattggtaaaagttccctttacagccggaatagcttcaattgtcttaacatcggctttactttcatcatttaaaacaaagcgcatacgtgttgcacaatgtgtaacagcagaaacattttctttgccgccaatagcatctagtaataccttggcatctttttcaaattttcccataaatttttcctaggttaacctagtcctcctttaatatgataacagtatgtttactttttcattgtaaacgattacaaatttgttggcaagttgtccatagaaaaaaagcgcaatttttgttaaaataaggtcagttgtatgcatttttttagacaaattagattgaattgcttatgaaaaaatatgaaattatttttaaaaaactagaagaagatattctcaaaggacactatcaaatgggtgactatcttccccctgaaatggaacttagccagatctatgccagcagccgagatactgttagaaaggctttacagctcttgactaaggcaggttttattaaaacagtacagggaagaggatcccaaattatcaagcgtgaacgcattaactttcctgtctctcaactaaccagctatcaagaattggttaaacaattgcagatgaatgtcaagacaaatgttattgctattgataaactgattattgatgagaaactcaccaaactaaccggttttgaaaataaaggtcttgtctggcgcatcacaagacagcgcgtaatagacggcgttgcttccattttagatacggattatttggataaagcattgattcctcatatgaccagagaaatcgctgaacattctatctatgattatcttgaaaatcaacttaagctggacattgcctatgctcaaaagattattaccatagatcaagtatcgcaaaaagataaaattttgcttgatttggattctgaaaatcatgtcgtttcggttaaatctaaagtttatctcagtaatcagcagcaatttcaattcactgaaagccggcacaaactggaaaagttccgttttgttgactttgccagacggcatcgtgattaagacaacaaggaaagcacaaaataaaaagaggctatcatcaacctcttcaaacataaaccgaagtattataccttcaatctaatatataaattacagcacacgctattttaactcaaatcttttatgactttgtttattcccaaaacagttcatttataaaacttcaaacatttttacccactataagaaacccagataaaatattttatgtcatgaaaaacactacatggattaaaggattcagtaaactctaaattattgcttctaatttccatgtaatttcgtaaaatccactttttcaatatttacagcagtatccgtcaatttaaataattcttgaccatctgttgacatatcaaaatcttctactgaatctgatgagtataaaatataatgactactttcttcaggcaatttaaataccacctgaatctcatcttgtttattatctactatctttttaaaaatcatctgaggataaatacgatattcacaaaaatgtaattcaactccaaacatctgcaatgttagttctcttggactaacaacacctaatgtagctccttgctccaaagtatgttctgatggattgaatttctttttgtcgaatgaaaaactaatctgacttttgtttttaattgctaccaatctttcatttataaaagattcaaataatatctttgtaaaatagacatcatcattatctattttttgtgggaaatcgaatgaaactgcaaaataattttgaatttgtttaagtgcctctaaaaaatcatgatttttttcaaatacctcaacttgttttttgtcaggttttataatcttattgaatatttttattccacccttaaaaaaagaacggataacatctaaatttttaaaatagtcgtctaaagtcactaaattatcatagttaagtttcatcaccagattggcgtcgcctgatttctcgtttaatattagttctaaatcaatcaaatgatttctatcagagacaatttttctttcagttaaacttggatatggaactctcttaataggtaaataaactttttgcttatctacttcaatttctaaggggtctaaatcaggaaatttttccacggaacctataatttgagcagttataccagaacttcttaaatgtataattgtaggcggatcactttgtaacgtttgatccaatttaaatactttttgcgttctatacatagcctcaagcaattcatcaagattatgaatttccattccttcaaacttcaatggaaacttaattcttacttgaaaactattttccttacgatttttttttgatcgcaagacatacatatcttcagtcccttccatcaattcataagaatagcctttaggagccttcaaattcaatttttttcttaacgcacttggtgccttaatcgttttagtgttgttttttctagaaaagactgaattaaacttcgaattaaccactcaccaatcctccttcaactcatcatataccattattttagaaattagaatatctttatcttgagggcaaagtcgttttcctttgcgtttccctttaataaatcttattagtttctctctattttggacagtatcaacaaatatataccttacatcttcaacatcaaaattcagtctccccttaattgttagtggtacactgtctgtataaatcttatttacttcttctgcaagaatatcctcttcattaatcaacattaatggaagttcgcttgattccagttttgggatatatctccattcatgctcatcttgaaaattctttcttaccacttggatattattatctttgcccttacgtttcatctgaccatagtaaggttttataattctaatatattcaaaaatgaaatttgttaaaatatcattaattttagaatcctcacttactccatcgatatcttgactcaacaataaattcattgtattcgtaagttcctcaacattgatagatttttcatttagatagtgaattggttgaatgccttttttaatgccaaaacttttatgaaatgctattgaaaacttaccatatcctttgtcctcagaagatgatggattcccctccgcatgatagctgatttgatgcaatggtatatcacaaaagcaagtcataggaatataccactcagttaagtctttcgaattatattttaattttaaatagctaatatcttcagggtagtatcggggagatattgacatatttaacaaaattttttctaaaaaagagtactctctcatgaaattaaatagtgcattagctgttatttttgagtgattagtttcatcattatctaatatttctttagcctgataatttttattttctgccataaaacctctttttacaaatatcactattccataaacttaattttactttcaataaggatccaaaaaagtagaggttacattttcgcatgactctgtgactccaattgtatcaatttctgtatcatccacaatggcgtaaatacctcactagcttctgaacgcgatactttgatttaatcaaattttcttccaaaatatttccttgttactattataccatgactatttcaagaattcagaagagttctactacctattttcgatccttaatagtttcgaaaatcccctcgaatactgcttcctacgagcaacattctttttatcacggcgaatactatccttttatcgaaaccttcaagatgattttaaagagttgaaagttaatattgtgcgttttctaaaagagaataatcgagtgattaatttgtgatatgcaaaaacctcagatacaattatctgaggtttcttgtcacataataaaacttacaatgaaactatcgcactattacaatcaatcattttttctaccctttatcaagcttaataatcctgcagcgccgattagaagcgcaccagcacctatcactttgaggagattggagcgcgtttcattgttatctcctgtttgcggtaactctgcttgggagattgacaatgatcgtttggaaagagttggcagctgcaagtcattttcttcaccggttaaggctgaaacaatctcatttttattttcatctactgcctgcttattagctactgggagagggctgactgcttctggagtttgcggaattgctggttcaagtgtcctagcaggatgttggggctgttctggaactttaggcgtttctggtttaatggtttcattaatataaatcatatcccaaagcgtcagtcttggcacttgaatataaagaacaggatcgccattctcattcgtttttacctgggtcgctagagaaatcatactagattgcagccaatcatctggtgacgtcagatagacttgtttagctattcgatcagcctctgccatagacacaccagtcaaaggataagtaaccaataaattggtttgctcatcaggtgttttattattttcataaccatcttcatttttccagtcggatgtaattcccataaggttgagcaattgaatcgttctgaaatcgtttccttttttggcataagtccaaacctgatcgccattgatccccaaagcatcttgcgatagctgccgaccgttagcagtgaaagtctgaggttcagcagaatcattttcaactttatcacgcaaaagattttcataagccgtaataaattgttggtaatgatagtttttacgattgagctctttcgagaccttgaggctttgtgttggataataagctgtttctaagacaccgacaccacccccatcattaggattagccagagcagctagagacatgtgataacctcctgctgccgcaatggccgcagttgtcagtagaaccgcatctgtttggtaagttgctgaagctaaaacgtcacgcgctgcaccattgagaggaaccctattatcatcaaatttaggctcttccatataagctccgacaatcaaagatttccctgtcgcttggcgaacttgatcaacacgagctttcaagtcaccataactttcttggggacggttccccaaagctgaagttccaaaaggccataattcattgtaaatcacatcttgtttgctgttggcgagtttgctgatattttcaccattaacatcattgagtgttaaataatactgaggcagtttttccttcattttattgagaaattcagcatagacatcagataacataaaggaatgagcaatatctcgactgtccttttgattatgggaaagaacacgattatctccaattgtatctccctgccagccatcaaaaccgccatttttcatagcttgagccatggcattagaaatataattttgccaacttttactcaaaggattgtaataatattgcagcggcttatcatcaatagagtaagtcatgacctgaccattttgaccataaccaccagtctcataattatagatgtactcagtatctggtaaaacagccgtttcattagcattctgtgctaaaatcatattatagagcatggcaacagcgccagtttgatggacacgattgaccaaggatttaacagcatctgtttcaacctgcgaatggctccaccaattccaagactgatcaaacttaggaacattagggaaaggatttgtagcagacttataaacatcatagaagaaataggaattaatgttcatatttttcatctgctctaattcgcgataataatctggtaagttcttagtcaagacactgttattgtctttttgagaacctccaatagcagcataacgcggaaaggtacgccagtcatcctcaaccgcaatagcccgattgccctgctctaaaatattattttggctgtctgatatgttaaccttcaaaagataaccgcgattattagctaaggagtttgcaggaataacgaattcacctttttgagttgtataactttcattaggcagaagatacttcgtatactgaagtgtctttaatttattttcaagggaataaacctcagcagtagctgtaatattttgggctaaagatgttgtattgtttaaagtaagattcaaatgaacagcctctcccgcttgatagactgctttatctgttgtcagatttatcatgttgccattcttttggttctgtgcagtttctagcacagccctttctttattggcggcagataccatttgcattggctcctgatgggaattgttagaaagtttcttcgcttgaggttgtgtgttagtatttgcagagaccgattgtccctgttcattagaatctattgacgccggttctgtctgtactgcagccgcagcatcctccttctcttgcaccttaaggtctgtctcttgaaaagagttaatggtcgaatccaccgtttcagctgacctaatagctggttcagccgtttgcctatttgactgttccatatcctcagcaggcgccttttgagttacatcgctcatacctgtcatgtctgttgaactatcatcagccaatactgccataccatttgtaaaaagcagtatggttacaacagaggataaaaacatcttaatcattttttgctcattctttttcattttttaactccaagtattcattttgtcatataatattaatattaacaatataaatttgtattttatcaaaaatattacaaaatttcaatgagagtttcatgaaaaatttccaatttttttcatataagattgatgataagcaagattgaatgcatcaaatggtcactgtaaaaagacttttaaaggccaatgaaagtgagataaacttctatgattgctgtgcaattatccacaaaatagtgtgaatctgtcagattacgaataagaaatcctgagattgtcatataaaatagccataatagtctgacgcagtggctatttctgaacaagtctactctttattttttgtatccaatagaatcgtcacagggccatcattagtaagagatacctgcatatcagagccaaatattcctgtttgaacaggaacaaactgagctagctcttggttaaattgatcatacaaataactggctaaatccgcttgcgctgctcctgtgaaggccggacggttgccctttttcgtattagcaaaaagagtaaattgagacacagaaagaacctcccccttaatgtctcgaacggaaaggttcatcttcccttcttcatccgaaaaaattctcatattagtaattttccgaacagcataagttaggtcttcttgaacatcatctggacctatcccgactaataagactaggccttggttaatggaagctctgctcttaccttcaacagtcagactggctttcataacgcgctgaatgacaattttcatcagcacttacccgttagtccttttaacagaataaacatctggaatgaccttaattttatcaacaacagctgttaaaacggttaagttagggatgccaaaagtcacatggatattggcaaatttcatatccttagttggctgggcattgaccgttgagatattctttgtttgattcgataagatttgcagaacatcatttaagagaccggcacggttgagaccataaatatcaatttctgccatatattccttggtggaataatcatcttcccattcgacatcaatcaaacgctcttcataaccttcttgactcttaatattatgacagtcagcacgatgaatagcaacgccacgacctttggtaatatagccttcaataggatcgcctgggacagggttacaacacttagcaatccgcatcaagagaccagaagaaccttggacaatgacaccgccttcacttttaaccttaaggacttcttttttattgtcgtgcttgacttcgccgcctttcataagttcctcagcttctgctttagctttggcacgttcttgttcacggcgttctttttctgtcaacttattaaagacagtaacaggcgacaattcaccaaaaccgacagccgcataaagagctccttcattacggtagttgagacgattcaaaacagcctctatatgttttctatccaaatatttattggccacatagccctgctcttgaaaataatcaaccagcaaatcacggccttttgtgatagagagttccttatcttggtttttaaaaaattgacgaattttattacgagctttattggtcttaacaatattaatccagtcacggctgggaccaaaagaattggaatttgtgatgatttcaaccacatcacctgttttgagcttagctgttaaagggaccatgcgaccattaactttagcgcctgttgctttttctccaacctgtgtatgaatggcataggcaaagtcaataggaccagaatccttaggcaattcttgaacagcaccattaggtgtgaaaacataaatacgctctgcaaagatatcttctttgacagaatcaacaaagtcaaccgcattgccattggaagcgtcttgcaactcaacaagttccttaatccagttcattcctagagctgattcttgactgttaaccttacctttgattccctttttataagcccagtgagctgctaccccatattcagccacttgatgcatttcatgcgtccgaatttgtacttcaattggccctttgggtccataaacagttgtatgaatggattggtaaccatttgctttagggttagcaatatagtccttaaaacgaccgggcataggacgccaaagctcatgaatataacccagcatggcataaacatcactttgtgtatccaaaatacaacgaatagcgatcaaatcataaatttgatcaaaacgtttcttcttatcacgcatcttccgataaatggaataactgtgtttgggacgtccgtaaatctcaccatgtaagccctgctcttcagtataagctttaattttatcaacaatatcatcaactaatgcttcacgttcacgacgcttttcgttcattaaatgcgaaattttataaaattcaacttcattaagataacgaaaagctaaatcttctaattcccatttgatgcgactaatccccagccgatgcgccaagggagcataaatttccatggtttcgcgtgaaatacgttcttgcttatccttgcgtaaatgcctcagcgtccgcatattatgaagacggtcagctaatttaaccagaatgacacgaatatctttagacatagccatcaacatcttacggtgattttctgctagctgttcttcatgcgatttatactcaactttccctagctttgtgacaccatcaacaatgttcttaacatcactgccaaatttcgcttctaaatgatctaaagttgcttcggtatcttcaatgacatcatgcaaaaagccacaggaaactgtaatagcatccaaatgtaagtcggctaaaattcctgcaacctgaataggatgaataatataaggttcccctgacttacgaaattgaccgctatggcattccgtggcataatctaaagctttttgaacaaaggcaatatctgctttattcatatacattgagcagatatcaataacctcttgacctgttaaatttgcatctttcgccatcttttgcctctctaaaaatatcttattcctattctaacactttagggcaaaaagaaaaagggagaatacctgatgatacgcttagcagctaaacttttagtcgtcaaataaaaaagctcctatctttgacagataaggagtctttgcttatttattcaaatttgcttggcaggctaaaccacagtgatcactaatcattgggtaatgtttcccatcaaaaataacttctgatttttccacctgccaatctgaacttaggaaaacataatcaactttgagggcttcttgattgccctgccaaccatcaatttccttttggatagtggctttgccataagtaattttagctgactggtggctatcttgtaacttcagtgaactttttagaattgcttgatacccttcattttcataagggttgttaaaatcccccattaaaagtaagggaagctttaggttggacagtgctctttccaatttgttccattctccttgaaaccccttgttccaccaagacatatgaagactgacaatagcgatatcctcctgatcaattttcgtttttcctaaaagagcccgtctcgtatggtagtcatgctcatcatctacatctgatatgaggatcccctgactgacaagcggtgttttggataaaatagctacgccttcttgaaaacgatcataaccgatatgattataagcccaagaccaataataaactctctcttgttccaataaaaaagtcaccaattgtagagcataattgtccttatgaatggctggagttcctgccacctgacaataattaggcaaatctttagcaggttctgaatgcaaaagctgattcacctcttgaacgcaaataacatcataatcattttcaagaattgtttttcctaaaatctctaatttcttttgtgggccttcttccatccaactatggctattgattgttaataacttaaccattgttcctcctttatcaatcaagaaaaggagcggaatctagaatctcaagcaaagactttttagattctagcctactcctttttaatctttttaaagttctactttggcgacaactgttttagcagcttgttgacctgttttctcaagcgttacagacttaagttctgctgtatttgtaaaggcaacaataacagttgtttcacgatctgcagatttgatagcttccaaatcagcaactagaagtaagtctcctaatgcaacacgttggccatctttcaccttagcagagaatggagctccattaagagcaacagtatctaaaccgacatgaactaaaacttcaagtccatcatccgttaaaagaccaagagcatgtttggttgggaagacactagttactaaaccagctactggagagtagatattgccattttctggctcaacagcgaaaccatcgcccatcattttttgtgagaagactgggtcatgtacttgtgtaattggaagtacttgaccatctgccacagttgctacttcttctgtaactcctttgaagctgacatctgctgtcttatcttcttctagagctgtaacatctgtcttaggaatgtccactcctgaatctaataaatcctgaatatcagatttaaggacatctgccttaggaccataaacggcttgaacaccattgcctttgacaattaagcccatagctcctgcttttttccaagcagcttcatcacctactttagcaacatcggtcacagtaatacgcaggcgggtcatacaagcatcaacatcagagatattttctttaccacctaaaagattgataatttttacaatttgtgaattagcatttgctgttcctgcattactatttgaagctgtttcgtcagaagcatcatcacctgtatcataattgccattacgtcctgaagttgccaaattaaacttcttaatcataaagttggtaatgaagtacatagcaacaccaaagacaactgaaacaacgataaagttgacaatatccatagctaaaccggctttgatagccattggcgttctcgtcagaaactcaatattaccaaatgaatgcacacgaaggtgaatcaaatcggctgatgcaaaggccaaaccttgaacaacagcgtaaacaagatagagcggtaaagctgcaaacataaacatgtattcaagtggttctgttacccctgttaagaatacggcaacagctgctgaaaggaacatccctttatatttttcttttttatctgggtcaacattgcggtacatcgccaatgtaagtcccataagaatacctgatgaaccaatcatttgtcctaccttgaaacgagcaggagttacagatgttaacaagtgatggtattgagacatatgacctgcacctttaagatggataaggtcttgcacccaagctaaccaaagtggatcttgtccaagcacatgttttcctgcttgagcacctgtcaagacaacataagtaccaccgagttgggtataattcattggaatcgttaacatatggtgtaaaccaaatggcaacagtaaacgttctaaagtaccataaaggaatggcgcaagaaacggtgcggtatgttgtgaagaagcgatccacataccaaaaccattaataccagattgtacaattggccaaaatacagaaagaattaaagcaacaattgttgaacgaacaataacgacaaaaggtacaaagcgttttccgttaaagaacgataaaacatctggaagtttacggaaattataatacttgttataagctgttgcgccaacgaaaccagagataataccaacgaaaactcccatgttcaaggcaggttggccaagtacattgataaagtaatcagcaacgtgcatcttaccgccaaagatattgtgcacataacttgttttatccgcaatcatctcaagcgatacgccataaaagttaccagtaataaggttaatcagaataaaggcaagggctgcagcgaaagctccacctgcacgttccttagcccagctacccccgatagccacagcaaataaaatatgaaggttgttgataacaccccaaccaatttgggcaatgatattagcaacagtcactaaaagagttgatttagggtcaatcaaggctaatgaattcccaatagaaaccatcaaacctgctgcaggcataacagcaataacaaccattaaacattttccgaatttttgccaaaattcgaagctaaaaagttgtttataatttttcatttttacctcccagcaaacatctttttcatgcaaacgtttgcattttatggttctattatatcatgattttttattttgtaaagagcattttaaaaaaaatttaagaaaataaacaaaaaaataggcagttgaaaattctaaaatgaattagccatttgaagatattaaaaaacacctcagagagatataatgttattcatcacaaccacattagaaaaactctgagatgcaaaaccgttatagctcaaaaggaggacacttgacaataacggaacgtcaattaattgaaggctggaaaaagcaatggtgctattgtcaaacttttaagaaagctccgcaaacgattcataacgaaatcaaacgtggcttaatcatacaacaaagacgtagcggaaagtttgaaaagatgtaccaagctgacagccgactatgctcaacattcctacaacactaaccgtaagcaatctgtaaagcctgtgacttatgataaagaaacacaggagaaaatcaaatcctgcattaccttaagcagaagttctctcctgaaatgattgtgagagctaagtctcttgatttttacgaacaggcagaataattccaacagtattggtttgctttttaaccacatttgagcggagtagttaggagaataaattaagttcttttattgcctgatgtacgcgctcctttgttgtctgactaatcatgtcatataaagcacaggatgtagtagaaggtgaaattcctgctaatttagcaacattttttattgcagccattataattttcattctatttaactttacccttgaggataatataacagatagcaattcctacttattttgctaattccagaacataactaatactgcttaaagcaaacaacggagctgtttctgttcgcatgatgcggggtcctagtccaactttaacagccccagctttctcaaaggctgctatctccgctggtgaaaggccgccttccggaccgaaaatgaaaagaatttgctggtctgcgctcagttgtgctagttcacgcgccagagctgcgctttcaccgattttagcagattcttcataggcaacgaagattttattaaatacggccaactgagtcagaaagtcagactttttctcaaaaaatttgacttgcggaatgatattgcgtttggactgttcagccgctccttgggcaatcttagtcagcttatcggcttttttgagcaattttttactatcccatttaacgacagaccaatcagctggaaaggcccagagagcatacgcacccagctcagtcgtcttttgggcaagaaattccaatttatctcctttggggaatcctgaagcgataacgacttggacaggtaattccacattgtcagatagctcatctacaatttcaaaagtgtgttcttggacattggtcacacgcgctaaacgtttgatcccatcatcaaaaaccagcaccacttcgtcatcctcagtcaagcgcatgacattaaacatatgcttgatagtatccttatcggtaatcgtgaccagcttgtcagctttgccatttacaaaatactgctgcatttatcctccaatcacgcctgaaatagcatcggttttcttgaagacaagggaattccattcgccttgaatcatgtgggtttcaaggaaaaagcctgcgctgtgagccgcttcaagaaccatatgtaatttttctgaaataataccggacatgatgagataaccctcgtccttaatgagacgataggcatcatccgtcagattgaccagtatatctgccaaaatgttagctacaataacgtccgcttcaatcgcaacacccttgagtagattacccgctgtcacatgaatgttttcagccccagcattgagatcaatattttcttgagccacgcgcaccgctacatcatctaagtcgtaagcgaagatctccttggcacccagaagtgagctagcaacggaaagtaccccacttccagtaccgacatcaataaccgtttcgccacctcgcaagacctgctccaaagcaaagaggctcatctttgttgtcggatgggtacctgtgccgaaagccatgccggggtcaagtttgatgattttctcacctgcttgggcttcataatcagtccagcttggcacaatagtcaagtcatgggtgatacgagtaggttcgtagtacttcttccaattctctgcccaatcttcttcaaccagctcttgtgttgataactgaacagcacccgtctgcaaaccaaaatcggttaattctgctaagcgctcattgacctgtacggtaataactgtcatatcagcagattcaggatagtaggcagtaatggtaaccatttccacttgttccacctctggaaaaacttcgccatacttaccaaccttaccaaggtagtccgcactatcatcaatggctacgccttgactgcccaattcgattaaaatattggaggctgcttcttctgcctcacgattgactgtgatggttaattcttgccatttgtccattttgtttttcctttttttctttttgatagttgctttagacgatgaggaacacaaaacgattatcggtgtaagctaaactattatctaaaaaattcaccataaatgagtaataactttgtatgcaaactttgaacaatcgccttagacgtgtaattttgaatgtgcctctaatactttgatcttttagttatctaacaatctctttttgccaactatgctacaccattatcacgagcttttttgtcttcttctcaccaaacgcagccaggcttcttcgatcattaaagcaacgaaagcaaagaagctacaaagggtttcaatgttggaaccaattgctgttcctgcataaatcttatcatttagtacaatgtcatacagcggcagacctaaaaaggttacagtataggattttaccgagatcgcattagcgtggtaataaccaataaaaatcaagatactgacaaaaagacagccaataataaaccctaaaacaagggcataaaaacgtttcaaatttttcttcatattgctctcctatcaatacctcggataagggtaaaattctgtctcttccaaccctgctcggccattttcaaaagcttcttcattccaaaccatagcaaattctacggcttcttcgtccgctaagaaatccataaggtcacttaaaccttggtcggctacttcattcaaaaaatctgcaaaataggctaagtactcacgcgacagccccttcttgggatcgtaaggaacagttaccagatagtcatctgcatcaaacttagacttggcaggattgtaaaacagcacatagtcctcaaaaatgatgtcctcattgctcacctcgcccttgtcatcaatggtttccacgctgtcagcgttctgaacctccagcacaaagctcaactctactgcatgatttttcttattccaatctagagcatagtcgtaatgaaaatgcttatccatttcttctttcaacactgataaaaaaccatacttgggcataatcatcctacctaaaatctttttcttctattatagcattttcatcgtaaggcgacgagtcatcttgtcacaatgtacatgcctgttagcaaacttttgccaaatttgtgttacaataaccttaacagacttagaggagcaaagaaaatgaaaataagccctatgttactaagtgacattgaacaagttgttgaactggagaataagacttggtccgagcaaaatacaccagtccccctacccgttgctagtaaggatcaaatcattcagaagtttgagagcaacactcattttttagttgctaaaataaaagataagattgttggtgttcttgattacagtcctctctacccctttcccagcggtcaacatattgtgacatttggtattgctgttgctgagaaagagcgtaggaaggggattgggagagctttagtccaaatctttttaaatgaagtcaaaagcgattatcaaaaggttttaatccatgtcttaagctccaaccaagaagctgtccttttttataaaaaattaggttttgatttagaagcatgcttaacaaaacaatttttcctcaagggacaatatgttgacgacctcatctacagctatgatttggaggctgcctatgccaaataacctcgcacttcgtatgcgccctcgagatatctctgaagttatcggacaaaagcatctagtcggtcaaggcaagattatttcgcgaatggtcactgctaaccgtctgtcttccatgattctttatggtcctcccggaattggaaaaacctcaatcgcttctgccatcgctggtacaaccaaatttgcctttcgtaccttcaatgcaacaaccgacactaaaaaacgcctgcaggaaattgctgaagaagctaaattttcaggtggtttggtcttgctcctagatgaaattcatcgtctagataaaactaagcaagattttcttctccccttgttggaaaacggacaaattatcatgattggcgcaaccactgaaaatccctttttctctgtcacccctgccattcgctcgcgtgttcagatttttgaattagagccattatcaaatgaggatatcaaaaaagctatgcaagcagctctgacagatacagagcgcggctttgattttgaagtcaaactagatgatgatgctcttgacttcattgcgcaagccaccaatggcgacttgcgctctgcctataattctcttgatttagccatcatgtccacccagccagatgataatggtagtcgccacatcaccttagacactgttgaaaacagcctacagcgcagctacattaccatggacaaggatggtgatgcccactatgatatcttatccgccttacaaaaatctattcgcggttcagatgtcaatgccagccttcactatgctgccagattaatcgaagctggtgatctgccaagtctagctagacgtttaaccattattgcttacgaagatatcggcttagccaatcctgatgcgcagattcatacagtgacagcgctggaagcagcccaaaaaattggttttcctgaagcccgcattttaattgccaatgttgttattgatttagcactctcacctaagtctaattccgcttatgttgctatggacaaggccattgcagatcttcataagagcggcacgatccctattcctcgccacttacgtgatggtcattacgctggcagtaaagaattgggcaatgcccaagattatctctacccgcatgcttatccggaaaaatgggttaagcagcaatatttaccagacaaactcaaaggagctaactattttactgccaatgaaacaggtaaatacgaacgggcattaggagctaataagggtaagattgaccagctctcccaataatggcctttgtaaaaaattggatttttaacttgaatttttttaacattatggtatcatatttaaagaagaattgctgtggcatacgaattcacatctaagtgttgaccgactatttttttgtattatcgggaaacaaaagtcttctgacagtatgcaggccgtttcacgcggaagcaactaaagtcagagcgagttgcccacctgcttaagcgtgcgggttcaatacaaaacgtgaatcatcggtgccaatacagcattttccttccttagctcagttggtagagcagtggactcttaatccatgggtcgtaggttcgagccctacagggaggataactataaaaaaaaagaaaaagctcacactgatgggctttttctttttaaaatgcgttcctaccaacaattttaatggtaatctagtaaaagtctgaggctgttaaacaaaacaattagggtagaaccttcatgtagggtcacactggtaaccattgaaagatgtccaaagaaagtaagattgatgagaaggacaatcacaaatagagcaaaactgatattttgtcgggtaataatttgtaaacgtttggatagtttatgagctttgactaacttggttaaatcatttttcatcaggacgatatcagctgtctctatagcaatatcggtgccatctcccatagcaattcctagatccgctgtagctagggcaggagcatcattaacaccgtctcccaacatggcggtcagtccatactgactttgatatttcgcaatgatttttgctttttgttctggcaaaacattagtgacgacctcatcaattcctaattcacgcccaacagcctgtcccgctgccttggcatcaccagtaagcatcagcgttttgacaccagcagctttaaaataattaatagctttcacagcattagcttgtggtctgtcttgaatggaaatgaatccaacaactgtttcattgagagcaacaaaaacaacagtcttcccattagcttcctctttttcttttttttctaaccagtgcttatcaacttgatgaaataattgaggctttccaatcttgaacgacaaaccatcataggttgccagaagtccctgccctaagtagtgctcaacactaatattcaatcttttctgtgagggctcaggattgaaataatttacaatagcagttgccaatggatgattggattgactttccatagctactaagactgcttcgaatttttctttggaaatatcagaaagaagaaattgactagtgaccacttttggtttcccttctgtcaaagtccctgttttatcaaaggcaatcattttgatagccgttaaatcagaaaggaaacagccacctttaaataagacaccttgccgtgctaaatttgaaatgccagctaatgttgctgggatgactgatactgccaaggcacaaggagaagctgatactaaaaaagtcaaactaatcgaaattgtttttgtccaagcccaattccaaaataaaggtcctgaaataagtaaaccaataaaagcgaggagaacaatgctaacataaatgggttcaaagcgattaagacgcttagcagcaggtgaaaaatgaccctgagaagcttcaactaactgtaaaattttggcaaatacagtctgcgaactgtctttgctgacttctacaataatcgttccagagccattaatcgttgaggcataaacttcatcaccaaccgttttttcgcatggaatggattctccagtaatcgttgattcgtcaatgctagtgtatccttctagaattttcccatccgctggcacctgtccgccatttaaaacctgaacacagtccccaatcttaagctgatcaacagaaatcatttcaatttcattggtatttgtcaaacgtctggcttctgttggattaagctctaatagttttgtgatttcacgttgactacaaccttcaacatacttttctaaaaagtgtgcaccagcaaagatgaagataagaagagctgcttctgttgtttctcccaataaaacagcacctaaagctgccaacgccatcaatatatgcgtgttaggaacaaaacagttggctttttgggattgctcaacagtgtcttcaacaccctcccagataacatgataaccagcagtcagcaaggccaagatagttagactatttttgacctcaggagtaaaattgggcaaaagtcccgcaataaataatattaaccctaaaaagaaaaaggttactggcatattgaaagccaagtcatttttttgaagccttttcttttgtttatcgcctttagacatgattggctcctttccaatatagaaatcattgcattttttagcaaaccttgttatagtttaactataaactataccttaaagggaaggtcaagctatttgtgaaaaaaacgcaacagttattaacaattggacaactggctaagttttcaggtcttcatgtcaaagcattacgttattatgaaaaaatcggaattttaaacccgactgctatagataaacaaaatggttatcgctattactcttatgctcacattccttatgtgaacatgattaaaatttgtgctaattatggtctatatttaaaattaactagcgccacgagcactagagtatatatgaatattcctgagacaatcaacttaacagctggtaaaattgcttataacctagcaaaaatctgaatggtgtgaatttcacctctaaaatacatgaattgagctagattttaccaaaaagttcacaccatttaaattgatatctgataagccgtttttttctttctatgtgtggtgttttcgatattccgaaatcgtctttcctgtccactttttaaaggctcgtgagaaggaagatacttctgagtatccaagcaaataggccacatcatccgttgtcatttcagaatttttgaaataactaaaggctagaatcttttgtacattttgcaattcctgattaaacttagttccttcagccgttaaattgcgttgtaaggttcggctactaatcccaagggtcgctgcgatatcttcgatactaaaggcaccgcttgggatagcttggtagagtttttgctggacaagtcctgtaaaactctcactcgtcatagcctctgctaaacgctctttgagctgtggctctagatagtccaacatgacattattggcagttaaaaatggtttctccaagtccgcttttttaaagacgacttcatttccttccatttgttccacatgacagccaaattcagtaagggtcgcttctttataaacataaggagtcccaacgtgtactggcgtgatgttttctcctgtccctgtgcgaaccaaatcgaccaataacaactgttcgttgaggatagcgaaacgaggcaagtcaagccctggataatcatagcgatagctcacacggacaaggtcctcaaaggtttcaatgctgacaacaatggggcctgtgattttcttgtatttgccgaaatgttcaatcgcggcaaggccatttctagacgagagtgccgcaaagaaagggggcataaacatttgaatgtccttgatacgactcatggcaatgatctgctcatcattggccaccttatcaaatgccgtcaaaagatggtaataatccagagttgagagattcatctcttccttccatctagtatctggaagattggctagttccaaaatcattttcagatctagcccgatcagtttcaaattgtcaatatactgctgactgagactcagacgcatagggttcctccatttccattaacgcatagacatgagcatcatgcggtcgaagaatttatcgccaaagacacgacgaatacccaccaagagttttcctccacgaccaactaggtaacgtgttttagggttacgggcgttgatgattttaaggactgtacgagagatgacttctgggtttgaacctggtgttggattgttttccattgccttaatgtagccattaaccaaacgactgtaagctccatttttagactcgtaggagaagttttgaccaactgtcgcgttaaaacccgtgttgatcatacctggttctaggacgacaaccttgattccaaactccttgacttccatacggaggcagtcgctaaatccttcaatggcatgttttgatgcgtggtaccaagcaccaagtggtgtatagatttttccacccattgatgatgtgttaataatgagaccatccttttgagcacgcatgtaaggcaagactttcttggtcaagcgtgctacaccgtagacattaactttaaattgttgttgggctttttccatggacaaatcttctactggaccatagagaccgtaacctgcattgttccagagaacatcgattcgaccttgttcagcgatgacttgcgctactaccttctcaatatcttcttcattggttacatccattttcatgatgtgacctccgagagcttccaaatctttcatcttatctacactacgagcaacggcgtagactgtgtgacctgctttaatcaaatcttgggctgataattttcccatacctgatgatgcgcctgtgactaagataacttttttgtttgacataatgatttcctcttttgttttatttgattgatgagactattatacgatacagaatccgacaagtaaatgataatacctgacagggtgatgacaatttacgacataagcaagagtatttcttctactataccatttttaactggtcaaacacttgaattgcaattctttgtaaaatttttaaaaaaatcattgacatggaacgcgttccacaagatatactttagaaaaacaccaaacggaggttcataatatgacaatcaaacgtattttttgcgatatggatggaacgctattgaatagccaaggcagactgaccgacagtaatgctaaacttatttctcaggccaatcttcccttcactctggtttccgcacgtgcacctatggagatgaaagaggccattaataaattagaactgactggcccccagattggtttcaatggtggattgatttatacctacaagcaaaatcaaatcaaaatcctgcatcagcaagctttagaaagaaatgattccacttatttaatcaactttatcaaccagcattttcctcacttaagtcaatcttactatgacttagaaaattggtatacttataaaatggacgatggaatcgactatgagcaacaattgaccagactagaggcaactattatcggggaggagcaatacctaaaagttcaaacaagtatttttaaaattatgctcatcacttttgatggaaacgaaatgagagcattgaaagctaaactcgaagaattaaatcttccaaatgtttctatacagcaagctggtgacttttatctagaaattacacacaaaaaagctaaaaaatcagttggaattgactatctaatcaaagaagaaaagttaaataaaaaagaactagccgccttcggagatggtcacaacgatctccctatgtttgaacgggttggactgaatattgcaatggaaaatgctaatcaagcaatcaaagacaaagtcaatttcattaccaaaactaacgatgaggacggcgttggctatggtatccaccactttctcctgtaagtccaagcttgccaacaactcctatcatttggtatagtgtataaagaaagggggtactatggtttccatacgcgacatcgccagacaatctggctattctatctcaactgtttctcgctacatcaacaaatcaggttatgtctcacaagaagctgccaaaacaatttcagctattataaaagaactagattatagacctagtcagattgctagagacttaagtgctggccatactcgaaaaatcggtgttgtagtgcctcatgttcggcatacctactttactgaattgataaaggggttgctagacgcagccctagagagtcattaccagctcctatttttgccatcagattacagcattgaagctgagaaagcctatttggaacagctacggagcaatgcttttgatgcactaatctttacctctcagtctattgatatacagaccattgctaactaccgaaaatatggctccattgtctgtctggaagaaactgacttacctgagttaatttctatctcagtggaccgaaagcccggatatcaagctctctttaaatggctccagaagcataatccccagaaaatagctctgttattctctcgaaacagtccaatcagtcccacttttcgtgaaaccctatcagtttttgaggaaattttcaagggcgtggagtatgtaacttttgggggattaatgcgatatgaagatgcaggatggatttttgaaaagctgtgtatgcaaaaagatttagactgcattgtttctaatagcgatgacttagcagtcggactactagaattctataaaaaagcttgtatagaaccgccactcattgtcagtcaaaccagtcagttgtctgggaaattgctcaatatccccagcattgacaactattcttaccaacttggcacacttgcttttaaggcggctattgcaaaaaatccccattcaatctgcttgccatcaaaatttctaatcaaaagaaaataaaagtggtttatgccacttttttagttttgctagtttacttgtatcctctttatacccattttctgttataataaattgttagaaatcagcacgaaaggatttacaatgacaaatcttatcaaacacaaacgggtagagtttagcgagcttttttatgacttggtttttgtctacgcgatttcaaaaacaactgccctcattcatcaccttcaccatggggttctatccctagatgctatctttggttttctcatgacacttctggttctagtcaattgttggatgattcagaccgtctacactaatcgttatgggaaaaattctcttttcaatatggtcgtcatgtttgtcaatatgggtatgttgctcttaatttcaaatatgattacaacagattggcagtcctattttcataccttctgttggacaattggtacactgaccttaaccttatttttccaatatctagttgaatatctcagaaaatcaactagcctagctgatcgtaaaagcatcaaaggctttctttggatgactagtcttcgcaccttccttgtctacctagctgccctcttgccaattcatcttggaattcatgtctacatgactggtattctcctgaccttcatcatgcctatcctattgacacgaaatgtttctcattttcaaatcaatcttccccacctgattgaacggatttctcttttagtcatcatcacctttggcgagatgattatggggcttgctgacttctttacccttgaaaatttctccatccattctatcctttactttatcatcatggtgaacctttttatgaactacttcggtcagttcgaccatgccattgatgagcaaggcaaaaacaaaggaattttcttaatttatagccactatcctatttttataggcttgattatggtcactgtttctatgagtttcttggtcaattcagaagcccatcgtttctttgctactagcttcttctatgctggtattgggctctttcagagtgcgatattatccaatggtcactttaacaaaagccatcttcgctataacaagacattttacggactccaagctggaatgtttcttctcggattgaccttttcactccttttctcagccaactcaactattgtcattgctatcgcgaccttgatgaccttggctatggaaattcatttcacccatttttatatgaaccggaccaagaaattctcaactccagattggaaattgttctaataactctttatatagataaaataatcagaaaggaactgtcaaattctggtttacgactaggcatttgaatagatttgaatgtgtgtagttccaaatgtctacgcttttttattttgcttaaattcagaaagtcagaatttctttgaataaatcagggaactttttatgagtagaattatgttgcttatgttgctattaattagtaagagaaactcatcataggaggtaaaatataattcctataaaccaactgtaccagaatctaaaagaaactatttaccattttgaaaaccatattatcacaaatatatttaacaaggaaaacaatctctctgtaaggctacttggttataatctattttatctatgcaaatcacaatatacagataactttgccacaaattcagaaattaacaacctatcaccaactatgtaacggagcaggtcagccaatttattatgaacggattgagccttcaaagattaattgataaaaacagttgattattttgcaaatttgaatacatttttgataatttaataagaaatatctaaaactgatgtaatgaaagtatctagttcagcttgacaaacttttctgctataataagcacctttggtatatccgcattctgaacagacatagtcgttatccagaacaaagtaatcaaaactagtttggaatggtttttgaacttctgtgatgattttcctttttatatctattgaaaaagagttcagacttttgctaagacctgtacctagatattttacataagcctcttttatagtccataagatagcttttcttttatagctattttgactccagtatttttcagattcagaaaaaactcgttcgccaatcaaatcccaatcttctcttctattttcaacatctattccaattggtgactttccgatagctaccactacccattcccctgaatgagaaatattaaactttaaattatgccaatttttaaaacatggcttgccatatttattataactataatcaatatctattatttttctagtatataaatagatagcatatttgagaagtacttctgctattacacatctgattttatcctctatacgaaaatacttagaagccttatatcgccgctcttcggtgacagcccttttaaggtagtcatacttctcattgttaatctgacctacatttaaacacagaattaatgctttttgaaacattgctctttatctccttaggagtctatctttttattttctttaatagacttgttcggaaactaattttcttcaaaattaatgatacctcaaattaattcggaccgtaaatcaaatcattttctgcggtttcgataaggctgattcatgatttgaaatgttttaaacttggcattgaagtgctctattttgatccgaatcgccgtcatctcacgattgagctgtttttcgctctctgttaaaggatgaagtttagaattcttagtcggaataaaggtgttttcatgaaaattaagaattcctaaatagcctaagtccacaaaaactagggtttcttctggcaaagcagctccagtactctccttaaaaagcgtgaaatcatggatatgcccatctgaaatggtgagctgacaggctcgctttgtctctaaatcaaaggtaatttgtgtttttaaggtatgtcttttctttttaccagaataattttttctttggtcttttgggaacgttgaataagactctctgtcacattaataaccacagaggcactaggagcctgtagttgatccagattaaaagaccagaagcacgtaaggtatcttctacccaagtgatggttgcgttgactgtccctacccccacgccaaaatcaaaagccagcagacgttgtgtagagtaataacgtaaataacgcaaagtcatgataagctggtcttccatgcttaaatgacgaggtcggccgcctctacgatgctctttcgaataagctgaatttagacactcaagcatgagctcaaagttttctttttagactccgattaataatttgaagttctttcgacttaagattttggatctttcatagaagcttgtcataggctttattataccatttttagtttccgaacaagtctaatatttaaaatgactatataatataatgtctgtaaatactaggtagaggttataagaataaaaaccttaacagttataaagcactctactatttgacaatagtcctttacccataacattagagtcatttgagcagattcataatttttgcttcttctttatcaaatgcataaacctcagagctactatcactttccagtactaaatttttcatgatagagtttggaccgatatccactaaaaaatcatggttattattcatcaaaatttccatcgtcttattccacaaaaccggagaagacatttgttggattaacaactcaggaatctcagaggaacttttgataaagtctccacttacagttgataatactggtatttttaaatctgtatactgcatctgtgaaacataaccttttatgtaactatcatattttttcattaatttagtatggtaaggtgcgcttactttcataggaatcatcctaaaggggatatattcaccacctaattttgcaacttccttatctagtttttttcaattgcagaaactcccgcgattacaaactgtttggaagaattatatcctgaaatagatacataacctagattatttacctcattaagcaatttatcaatatcatcttcttttaaatcagtgataagacctgaaaatccaattttttcatctgcaactctattcattaatttagctctttgtttaataaatattagagcttcttcgaatttaattccccctgcacagactaaagccgaaatttctcctaaactatgtcctaccactacatttggaaaaatagcatatttttctaaaaaatctaaaaacatcagatagcttgcgataaataccgctggctgtgctataggggtctgagttaaagtctgcaatcgaccactactaactatttcccaaatatcatacccaagaatctccgaagaacaagcaaaaatctgtcgagcactttcttttgcttgatatatccgccgacacatatgaattgtttgcgctccttgtcccggaaataacatagcataatttactttcataaaaggcctcaattcattttaagatgtaataaaaaacgtaaagaacaagccgtaaatggcttaacttcacaaaacactctgcattttccaacgatacctcttcgttataacacactcatatatatccgactaaatcaaagttaaaaagtaggtggctaaatctgatatgcatttatattgaaaaattgccgctggattaatttcaacgttcaatttttttctcatcttatttatgactttcagagcttggaccgaagtaacacctaatttaaaaaaactagtatcttcatcaatatcatcggcatcacagacaataatctctgctaaagtcattttcatataatcaatcaactgttttttatccaattttacgctcctttcattattctagatgggtaacaaatatcattatagaagagcagttcctggcaaaagattattaagctcctgtataacgtcataggcatcagcaacaaccgcataattagcataatcaaaaataggggcagatggatcattattaacagcaattatgatatcagaatttttcattccaaccagatgctgacttgctcctgaaactccaaaagacacatataacttaggagaaatacttttcccagactgccctacttgtctactgctgtcaattaatccttcttcaactataggccttgttgctatgactccggcgttatatttttccgccaaattattgattccgtttaaacattctggtgaagatgctcctcttcctacgcaaaatacagttgaaaaatgattaatgttaacttcctcattgttagatggaagatagctgctttctaaacactcttcttcaatatcccaatgcttatcatttggaacaacaggctggacagccatatcttgaacaggagtaactttatttgttttaaagcccccctccttgatcgttcccatattggtgccgcaattaattccgataatttgtgcaacaacagaatcactcattgctgctcttgaaaaaatatagccttttttatcatcatatacgatatcaatacagtctgctgtcagacctatctccaatcttgaagacaaagtagccgctatcgtttttccaaattctgttgcctgaaacagcactaattggggattgtccattgccattattttttgggcaagatcgcaataatcccaatttttaagtttatcggcagttccgtaatacaaaacatctgtgccatatttagcaaattcagcaatatctatcgcttctgtactatttataaataaaacgcaaacttcatgaccgctttcctcactaagttgatgtgctttagaaatcatctgtttcatatgatcggaaaagccattcccataatcacataccaccaatattccaccagaattttttgacattaataacacctcctaatctctcaacgcaccaaaatatctctgattttttgagcaatttcagttactgttccctccaatatgactttgtccttttgtttatcaaaacgcttgcttgtctttctgacttttgttctggaaccttttaatccacatctactggtatcagcacctacatcctcagcgtttagataacgaatactctttttcttagcccttttcatcgctataagactaatatcatccgcttttagtataaaattattatatctgacgataacgggcaagtgagtttgcatggtataaattttatcagtatcactcttttggtaggtgattttagaatctgttaactcaataatgttatcagctcgaataattcttctaatactcagtctttcacccaatccttgcggaacctgtcctgtttcaccatcaatagatttaatgccacatatgacagcaataacattgtcaaactgtttaattgcctgtcccaaaatataagtggtagctactgtatcagaaccagcaaacaatcgatcgctgattaaataagcatcgtctgcccctagggcaagtgcccttcgcaagatacactcagcgctcctacttcccatgcatatacaaataattttgatatcagcattgatttgttttatggataccagattttttaaagccatgctatcatatggattcatctgaaagggatcttgttctccttgattagtcattttaaataaggctttgctaactggtttcaagcataaaataatatttttactcattttacaacctctttcaacttaccatctcatgacttttgccatctcgtatatggtatttttttgcatttcattagtaccagaataaattgtactagccagagcatctctgagctctctttcgatatcatactcttttgtatatccatacgcaccaaatatttgcagagcatcacggcatgttttgatatagttttcactaacataagttttaaaaatagatacctctgcatatgccattttttgatgatctttcaaccatgcaattttatataacattagccgtgataactcaatggctattttcatttcagcaattttatgggagattgcttgattgtcaccgatacttttgccaaattgttttctcgtttttgcttgttctatacattcttccattattctttgcatagctccaacatgcggtgcaaattcaaagcacctttcccactcaattgcctgagtcaaaattgtactgccagatcctaatcgccctaaaatattttccttaggaactttaacattctcaagcacaacttcactggtgggacaagcaagcagacccattttatcaatattaggacctactttgactccttcaaattctctctcgacaataaaagcggttaatttcttagcgggttcttgttgagtaactgcaaaaacaataaagatatctgcaataggtccatttgaaataaacattttgcttccattaagaatataataatccccctcttcttttgccgttgtcaccatagcaaaagcatcggagcccgaattagcttcagtaatagctattgcaccctttttctcccctgtaaccataactgggatatatttatcttttaatttttttgaaccatgtaaataaataacattttgagagacccagacatgattattaacaacaaagacaaaaccattatttttacacgagtagccaagtgcttcatatacggccgctgccgtctgataattctctgctaacccatcatattcttccccaatatttaatccaagcaaaccaaactcagaaattttcttccacatttcttcgttgtattcttctaaatattgctcactatttagattttctttagcaaaattgataatttcttttttataatccttttgttcttgcgaaagtgaaaaatccatatttctattctccttattcaacaacgacattgacgtaactaggtatacttcttccttgactcatatcagcttctaacatcaagacaccgttatcatttttgtcaatttctttaaaaccattaaatttgtacgttatgtacataattctattccgaacggtcgggacaaattgtgctcgtactttaactccttgccgtctagcctcgttgcagatatagttcaataagatatttccgacacctcgcgacatcacccgacaggacataatgagtagcttgacctcccagatatctgcgtacttttcaaacaatgtcaaaccgatggtcccataactgccatatttatcatcgagctttgtaaccagcacctcgtatttatcatcagtgatacaatcgcaaagttcatcatagctatagatataacctgtagaatttaactggtgcgttctcaccgtcaattcctcaacacgctgaaggtcgcttttctgtgccctgctaatgatgaaattcatacttaaagagctcaaaaattcctcttgattgcccgtaaattctttttcgacagcatttcttctaatatcattttgatataacagtctacgattgtgagattcagacgtaagaaatctaggcttcatacagtccatatctaaaatcttgtctaattgctcagcatttatgaccctcacttcaggacaggcaaattgaacttcctcaagttcaaatggctgatcatctataaaagctaaagtatcactgcctatattgatatttttagcaattgtttgaattgcttgtgatttagggttccagtttatttgcggataaataaaatactcccataaaccaaattcttctaactttttcctagctatatcataatcatttttactactgatagattgaaggatccctctgttatcaagttctctaatgatcgtttttatattatctttcaacgcgacctgatccgactctgccaatatgccttcccatattgtattatcaagatcccagataacgcattttactttgtcggcactcatattatcacatcctgctgttaagcattaactttcttttccaaaagagcaacaatagaattgatatccttaaagttctcaatatccagttcatcattttcgaagttaatatcataataattctcaagaaaactcactaattgcattgtgaataaggaattaacaagtcccgtttcaaagatattatcgtcatcgccaattgtgctttcgttaaaatattttcctaaaaattctctaagtgtttttttcattttattttcctccgttaatcgtccataacattaatagtgataaaaaccttttttattctttctgccacagtgactcatttcaacttttcgacgaatcaatgggcataccctaaattttggatcttcatagtctttatataaaacttccaaagaatccattactgtatctaaccctattaaatctgcggtttctaacggtcccattttatgaccgaatgcttttttaaaaatgttatcaatctgtttaggctcggctacaccttcatatactagaaaagccgcttcattcataaataaatgtgacaatcggttagatacaaaacctgcactgtcatgaatggcttcaaactcaattccaacatgagttaataattcaaaaactttctcttgtgtatcctttgatgtttggcagcccaaaataacttccgcaaagttttttactggaactggattcataaagtgaacgccaattaccttatctgatcttttggtataagaacctaaccttgtaatcggtatacatgaagtatttgctaagtaaatacaatttccagcaaccacttcgtctacttgtttataaaccgattttttggcttcttcttgttcaacaatattttcaactataaaatcaaccattttgaaatctgaatagtctcttgccactttaatatttgctataatatcatcttcattcaaggttttatcaaacatttttttcatttttatacttcttgtaatgtcggaaatcaccttgcttgctactttatcatcattatcaaggataatgacttgataaccatagttagcaaaacgctccgcaacgccttttcccattacacctgcacctataattcctattttcggcttcattcttatcgcctcctgtctatttaaatctctatctcagacataatgtcattaatcttattttttctattaataatggacatctgtgatttatcccacggtccgagaaactcttttcggtagatgactccatctaataaaaaccagacttgattagcctttgcagctactaaggggtcatgcgtaacaagcatgatagtacttcctttatgattaatgtcaacaaataaatccatgatttcttctgaagacttagagtttagtgaccccgtgggttcatccgcaaaaactaatttaggatcattcataaaactacggcatatactaactctttgtgcttgcccgccagataaagacatcgtattcctatctgctaactcaataattccagttagtttcatcaattcatttgctttatcagcaatagtcgcatctacctgcttattgagtacagaagctgctaatatgatgttttctcttactgttaaagaattgattaaatgcggttgttggaaaacgtagccaaatttacgcaatcttatatttgccagttctacctgacttaattcaccgatatttttttcttcaagaatgacatcaccgcttgaaggctgatccataccgctaatattatagagtaatgttgactttcctgaaccagaaggtcccataattgctataaaatctgcttcttcaacatcaaaactgatatcattaagaacatttgttatcttttgcttgccatcatcaaactgtttccttaattttttaacacttaatattgttctcattattatcttcctttacactatttttgagtaagttttatgccatttagcagattgctagatagatatatagtaactatcgctacaactaagatacttattgggaacaaaccataaacgataaacggattgctgataaagactatctgaggagctcccaaagatgatgcaaatacacttactaaaggctgccctgctataagtaccaagacagaaccaatgattaatccaataatcagcggaatgattatacgtgttctgtactgagatctgatatcattgtttttataaccaagagctttcataacagcaatatctgctttgtatctgacaatcaaagttctcataaatatagtaattgtcaatatagtaaccaaaattgcaatgatgatagttatcatggtaattagactaaactgtgcaatgatatcccccatgctttgattaacatattcagaaatatctgttacttttccagcctgaaaatcagattttaatttgtcttctactgactgttttttcttttctgatgaaacgttaacgttaacaacacttctgctgacattggcatttgaaatgttgccaatagacttagcacttttcccgccgtttgtaatatcttgatagataccacttactttataagtgtatgtgtgatctgatattgtgaaagtaatcttatcaccaactttaacgcctaaatcgttggctagcaagtaggagaccgctacttgatttgtctctttcggaaggcttcccgttatacaagataaagagaaaattgaataatcacccgtttcaaaatttactgttactggtttgccatcagagttgtcagttttagccaagtaggtattgaaaatttgataatcagtaatattatcatcattagcaagagctgactttacagcgttctcagcaaccccaccttgctgaaaatcaactctgagatcagatgaagctactcccatataagacgtaaactgatttgatttaaaagtactcgtaatctgaacaggtagtaaaactagaaaagctagagacgtaaagataagaagaagaacaatataaggcttcttataacttagcaggtatttaatgcctagtttaaaattagcccaagcaccgcctcttccaaataatgaaggacgcttgatgactttatcgctggaaatttcattattatcttgcagcgctttgatagtattaactttctcaattcttttgatactctttcggcataatagaacaatagcgcagcctatacaggcaatcgctaatatttggagaccataatcaacaattcctttatcggcaacacccatatatagttcaaggttctgttctactaccggagttaatttgaaagataccagatatccgatggtacagccaatcacagtaattaatgagtacttgatgaggtaaatactctctatatacttattaggaattcccaatccttgcatgatagcgatatccatatagtcctgattgatactcgatagcatcgcaaatctcacacaaagcactgagataataaccaggaatactacaactactatcagcagggaggctgtcagtatatctgtcagagcatttaaaagtttcatctcggaatacgtaatagtggccccactggaaggcaattttgcgtcccgataagctgtttcaacagcatcaatatcattcgtatcttttatacgaaactctattaaatattctaacgttccagtcttacgggctacttggttccagtccttccgattgaccaatatacgctttgatgagacaaacgaggaattcatctcagaatccttaacaaaatctgcgattttaaaggtaatatagtcacttccgacttttatcttaatgggatctccaattctaagattgtatttaatcttataatatactggaacaagcgcttggccttctttaacagaagcgatgttgttttttgaatttagcagaaaatcgaattgactgttctgtgccaccaaggcgcaatctatgacacttttgctttcactacttccatcactattaatgtacaaatcttcgccagcaatatttaacatattaacaatctcatatttttcaacagagttattatttttggcaaattccttgacagcattcgcatctaaatttccagaatgcatttgcaagagatgtgaagtctttgctgtcgcactaaatgtattaagtgagttatttagtgaatataaaagatttgttgctgatgcaaatagtccagaagccattgcaatgaaaacaatcagtgtgatgcagataattttaccttttcgtagttccttccagataattcttcttttcatatatcttttagtcctccacattatagtcaaggcagtttgtttccatctgttttaaactcttaccgcttttaagaagcgggcttagaataaccatggaaataccgcaaatcacaagcatcagcgcaattcctctttcagatcctgttcctaggattttcccgactgaatccgctaaagctccatttttatataataaaggattaaaaacgtagtctgccaacactccagaaatagcatatgcaataatatagccaagctgagaaataaaggaaattaatccccaagctctcccttgagtatctttactgatattacatctcattaatacatctagacatacatttgagacaggaattgttaaaaagaacagaaaagcaataacagctatccatatgatgttcgtcgtgcagccaataacagctatcgtgatgcccatgaataaaaatgataatgaaagggccttaagataattctttttgattcccttcacacctagcaccaagcttgaaatgagcattccaatggcactgagagatagtatgacacctagtgtagaagaatcagttagttccaataacatgggttttatcatcgtctctataatacctacataaaatgtaattacaatagacaagattagcagtaattttattcctttagtctgagtcaattctttataaccttcaacaatgtcttttataacttgcacttttgaatctttaattttttggcattcattcatcaccttgcctgaataggctacggtaaataaggttgtaaagaaagtacacatatctattattaatattagataaataccaaaaatttgataaatcaaaccggcaaatatcggtgataggagaaatttagccgatgatgctagctgaacaagtccgccagctttggagtattcttctggtgtcagtaaatctgtcacgactgctttataggctggatcaagtatagccgcaaaacatgaactcagaaatacccagatacagactgcaggaatattatttattcccatgctaatcattataaacatgcctcctaagcacatagcagaaaagaaatctcctattaacattaatttagccctgctaaacttatcagcaattgttcccgaaataggagtaaagaaaactaagggaaagaatgcacataaagtgactaaggaacaggataaagcactgcctgttttttcaaagacgtaaacattcaagccaaaagaagtaagtccgcttccgatactggaaattaattgtcctacccatattactaaaaaatacttaaatctacttttactgatcattttcttcctccgaatttaaatctaaaaaactcactattttgtcggctactgcctctttatactttttcaaatacatatgccctgcatcagcaggcatcatgtaaaaacttattttcgaatcaagataatccttccacttcaaaatagtttgacatgaagttagactgtctttatggcacatgatgaaaaaggtaggaatatcaattttctgtacttcaatttctgatatttcttcaagaatcttatagtcagccctcagcatcggcgcaaagtaatccactaattcctgattgtctgtcaattcttctggcatggttccgattctcttgatttctttgaagataatctcattttccttatccgacaatcgtttgtttttcatatgatccggcgctgccgctgctgaaaatatcaatttcttcggagtcaactcaggatttttctctgctattttcttagccaaaaaatatgcaattgttccacccatactatgaccaaaaagtatactatcttttttcaaaatagtgatgaggtttttatagtataaatcaatcagctggacaaaattatcgcaaagtgcataatcagatcctacatgtcccggcggaaaagcaactctaatatcaacagggattttcgcacagatttcattagctagggacatgacagaggtcccacttcctcctaaataaggaaacataataatttgaattggacatttgctttcaccgattgcataaaacatctcactcatggaagtctcctttaattttcaagaaaatctgggaaaagacacagggcataggtatttaaatctttatttttaacaagtcgatagtagaggtacattccgataacaatgataaggaaaaatcctatttctaaaatctgcactcccattataaaattataaaattgaagtttactgcctgatgcaaccaaccaaaagcagaaaacaaagaatagtacattgccacgtgtctgattcataacaaatgcgataaaaacagaaaacagcattaattgaagtacataaaatggataggctgttaccgtttcaaaggaagaaagggcgtaacccggaagaacaaataaaccaaatataaaaccagtcattaaccctcctttaatactagaatagtattgtttttgcatatagggctttcagattatcctttcttttggaactgttttcaaaacccaaacaaattacttaacatactttgccgtaaaaatacagtctgtagttctttgctcatttagctttgattttttgagtttaaaatctcttttgtttaaacttttagaagattctttaacaggaactcatctgtagtgtacttattctttcaaaagagaataaggattgatttttcttattggtcttgcaagaataacgctgataataaaattaatgataataagcataaaagcaaaagctaataagacagccaatgatacttcaaaatgattcttattagctcctagcatgctccaaactgcattattcattatcggcaccagattaagatcaattattgcagaaaagattgccgctattgaaataataggagtaaaactaagagctaattgcaagatgagctgtctatttgaccaacctaaggctttataaataccaaattcctgttttcgagtagtaattagagcattgataatgatgtacatcactaataatatgaccaaagctgcgataatgaaaatgatgacagtgactgacgaaacaataccaccatacattttgctgctatttgctaagagctgttcatagttaaccgacgtcatatttggaaatttctctttgtattttttaatcagatctttcgccgatgtcccttttttcagataaacattaaggctttttggcgtcgtttgactaattttttgatatccaacatcagttagctcacaaacgattccttggttgtttatactttgaatgtagcctgtcacagtatagttataactccggttatcattggtaatttttatcttactgccaattttatattgcttagacagagcacttccaacggcaacttcatcgctttttacggggtttttacctttatatactatattattgttaacacgtgaaaagtcttcagatacaaaagaagttatagcaccatttgcataatttaaggaaacagaagtataacccaaaacctttttaaccttatcattattttggagagtggttttcagttgctttagatcatcttggttgttaacggtaaagattgcagatggcatctcatctgaaatagtttttaaaaaattgtcaggtttaaaattgacattataaagcaaggttcccgaaaaggccaataaggtcataatgccaaaagtcagtatgaaaagcaatacattttgccctaatgatgcaaaaatttgtttcaatataagtgaaaatttagcactgaatttagacgttgccaatgggaaatgatttttagttgtgcgtttgtgatcaattcctctgatagcattaataggctctagcctgcgaatttttctagcacaaaaataagtgcaaactccggtgactataatcataatacctgtgctgagtaaaatagcagaccaatcaaaaacgggtgtaaaggaaaagcctgattgggttgccaagaaatcagcaattgatggcagaacggtataagaaatgagagttccagctatgctggcaaaggctgctgtcaatatataaggaataatttctgacatgataatatttgaactggtatatcccgtggcttttaagacccccatattaatcagttcattttcgatatgatttcgaattcggaaactgcttagaaataagctaattaaaaagataatagatgcaatagcaataaaaatagcaattaaaagattggaaatcatagaccgcgcttgtttggtggttttgcgattattgatagtcagcagtgctattttcttgtcagaaagtagtgaactgatacgtttttttacagtatctagattagcattattttttaattttacggaatattcagcaacaagatcggatctgtgttttgaaactagtgttttataagtcttctttggtaagtaagcgccaattagatttgtaccatagttcccatactccatttcgccgacagtgccaccaacagaaaaggaatagtttcgcttacctatagaataagtcatcgtattaccggtagagaatcctcccagctttgatacatattctgggatataaatagtctctttagaatttttaacagcattggatacattcagcagattgatatctcttttgtcagtaatcctgtaaaaaacagtgttcatttcaaagttcgttccggcaaagtcatgaatcgttgcttttgaatataggccttcatgcctttctgtgagaataatatcctttaaattgtctatttcgtttaacagattgtcacgatcctgcgcaagtggaataagaatgttgatatctgcagtattgagctttttgaattgcttatcataagcatccgaattttgagaattaagaacaagggcaatattgatgataaatgctgcaataaatagcataattccgaaagaaacatattgttttttatgtttcctaagattttgaatagcaagtctcattttaccaccccatttctaagagaaatgtttcaaatgttgctttacgcttaagcgggtcagtatgatcatcaagattacattcaccagatatttgaccatcttttacataaacaatgcggttccctcgaagagcagactctttatcatgtgtaaccatgacaatactctgccctctattgtgcagtgaagaaaaaacatcaagtacagcttttgaattggcggaatttaaagcccctgttggttcatctgcaaatagtacattaggagtattaatgactgctcgaacaataccggctcgctgtgcttcaccacccgaaattaaagatggcagcttttcttgtgtctgtttagggagattaaccagtgaaaaaagttcttcggccctcttaacaacctctttgcggtgtttacttgtcagtattccagccgtaatgacattatccatcagacttaattgattcattaaatagatttgctgaaagacaaacccacattgttttcttcgaaatttagcaagttgatcgcttgttaattgtgttatatcctcaccatcaaacataatttgtccggaatctggtttatccatacctgaaagagagtacattagagtagatttacctgctcctgaggatcccataataactgtaaaatcacctttatagatattaatatctaagtcggaatagattgtttgcatactatcgcctttcccaaaacatttttttaaatggcgagctgagatgatagtttgtttatccataataagaacctacctttaatttataatagttttttgagtataacattatattaagatgtaaactgtcaaaatttattgactttactaatatttttcgctactttccgttacattttgtgcttttaagtgatgtaatagaatgcaaggtaagtgatgaaattaaaatattatgatatataacaaagagcaaaatgccgttgtattaggcgttttaaagcatttgctacgtaaaatagcagcaatttaaaatgacaataacgttttgcttttttataataatcgtcctatctgctaaaattctcttcaagtttaggaggttaatgttaatattgcaaaagcaatataaaaatgaaggtcatgacataaccataacgatatagtttagttatgatgagcttttttcaatacaacgattagaatatagataaatctatttttcaaggtaaaaaattttttagcgctgcagatttcaggtttattactttttatcatcgagcaaagtgagccctaaacgagacttcccgtcatgaaaaaagtggcagaaacgttaatgttcctgccactcggaagatttgagaccttagacttaacatggaattccctaagcacttgaaatcattgcattttttagcaaaccttgttatagtttaactataaactataccttaaagggaaggtcaagctatttatgaaaaaaacgcaacagttattaacaattggacaattggctaagttttcaggtcttcatgtcaaagcattacgttattatgaaaaaatcggaattttaaacccgactgctatagataaacaaaatggttatcgctattactcttatgctcacattccttatgtgaacatgattaaaatttgtgctaattatggtctgcctttaaaacaatttactcattacattttagatgatggcagcattgatatgaatgctattttaaaggaagctcagcttaaaattgaggaaaaagaaagacagctgcagtctgatgagcgctatcttcgcttcttttctgagcaaatcaatttctcccaaaagcttgataaaacaacaaatctgcatattgaacaaggaaataaagactattttctgctgccttttacagaggaaatgctgtcagcaaaatattatgaagctgttaggtgtgctctggccgagattgaaaaatgtcaaatgacttttgatgaccgcgttggctgttattttaagtatgatgatcaacaagtaaacagctttattgctattaaaatcaaagaatgtcaagaagataagacaaattttttaagtctatgcctcaatcatcgtcatattcatgctcaacacctaaccaaagaccgcattcaaccaaaaataaaagaactgcatcaaaaggagtctatcaatgaatttttaatcttagaaacctttgaaagtccttatcaattatcacaaccacatttagaaatgcaatacgttgttgataacaaaaggtaaacatataaatctcaataatagaacttgaaaaatccttcgtttctggtttacgaagggttttcttatcttttaatttatagttttctcaagcatttttatttattcacatgaaaatgtaaggaaatgtccaaatgccgatcaagacttgagttttagctcacttatccatcaccaaatgcctaagagatgttgcatcccaagactaaccaaggtgataactatccagcaggaagcgccaagcacaatagcctgaccgccggttttaaccagcttaacaatattagtatttaagccaacagctcccatggccatgacaatacaaaacttagacagagttttcaaaggagtgaagaaaataggattgactcctaaagctgttaaaatagttgtgataatagaagccaaaataaagtaaagaataaacataggaaagaccttctttaatttgactgtatgttgttgatttttccctacttttttagtcttataaacttgataaaaagataaacctaaggtaataggaataatagccaatgttcgtgtcaatttaacaatggttgctccatccaatgtgttcgaatgatgcagtccatcccaagctgctgctgttgcagtaacggatgaagtatcattgactgctgttcctgcaaaaagggcaaagccatggttggacaagccaatcatatctcctaaggttggaaaaattaaagcagccaaaatattaaaaagaaaaatcactgaaatggactgggcaatttcatcaccatctgcttgaataacaggtgctgttgctgcaatagcggagccgccacaaatggaagaaccgactccaaccaaagttgctgtattgacatccagtttgaaccatttttgtaataggaaagccaaaagcaaggaagaactaatcgttgctacgataatgggtaaggatgttttgccgactgttaaaacctgcgacaaattcaagccaaaaccgagcaaaacaacggcaaattgtaaaatatatttagacgtaaaagcaatgccagcttctgtatgctcacgatttttataaaaaatagcgagcaacattcctaaaaaaatggcaaaaaccggtgccccaacaagaggaaaactttgtcctaaaaaccaagctggcagagcaattaagaaacagagaacaagtcctgataatttttgaaatttaagcgacatttcaatctccttatcactaaatgatgttcttattatactgattttacaccataatgtaaaattatgatttattatgatacaataataaaaaggaatgctatcttatgctagattatcgtgttaagacttttattaaggtttgtgaaaccttgaattttaccaaagcagctcaggacttacacattacacaaccagcagttaccaaacacattaaggctttggaagctgagtacgcttgttctttatttctttttaaaggcaagcaatgtcaaatgactgccgaagggcagaaactttttttgatgctgacatccatgactaatgatattaagcattttaaacaaagagttcatgaaacaataactcagctgcactttggtgctacaatgactattggagaatacgttctgacagagtccttagctcaactgatgataagtcatccacgtttagaattgaaaatgagcatcgctaacactcaaaaattactgggagaaattgaccgaggagagattgactttgctgttattgaaggcttcttttctcaagaacaatacgacagttccatttataaacatgaaccttttattgcagtggcttctcctgcttgtctcctgaaaaatcaaaaactaggcttaactgacttactagcagaacccttaatcattcgtgaagaagggtctggcacgcgcgaagttttagatactattttgaaagaaaaaaacttggctaagtcagattttcaaagggtcagtgaaatcagtaatttaaacacgattaaacaactcgttagtcgtaatttaggaatctcctttttctatcgcagtgttgttcaaaaggagctagaagaaggcagtttaatagaattaaagttggaggagtttcccgtttatcatgatttcacctttgtttggaataaaaatagtttttttgaggaagaatataaggaagttttggatttgattaggacttatgcctaacagatatagcaattcatctatatactacaactatgtcgtgatataatgataattactaggagggtaatatgaagaaaagaaagatccttattttactgactttatcaatgtctctgattttagtagcttgccaatcgcattccaagattgatacggataaaatccaagaaaaaatcgctaaggaacattctaaatttaagaaagagcaaagcgaaagctcctcaagcaacgcaaaaacagaaaagtccactgaagcccaaaactctgattcatctaaaaaagctaaagggcttccaaaagacgctaaccatgctaagacagacaaaatttatgctacaggagatgccaaagtttactactccaatgaaaacgatggttttgaagctcagatttcagacttcaaaggttataatcaagataaggttaaaaaaattttaggtaagccagatagtatttcaacagaccaaaatgctattcaaaatggttttaaggaaaaagaattagaaaatataaatgagcttaccaatagtggaagcctgacagaagaacagggcaaagctttctatgctgttgctgttgatctagctcaaactactaaaataaacaacagctctcattacgtcttatttagttatcaaggtggcaaagtacagcttatctttaatggtgatagcgacctttactacatgaccccaaattcaaaatacctttatttcaaataaaaaatgcagaaccaaaataagtgctcttaaacagttgctttttttgtccaactgtttgagggcagcactgctctttaagtaaaatctggccatttgtcaagtcaaatgggtgggtgattaaaccataagatcatatcaccagtcagaacctaaaagtcgcataaataataaacagacctgaaaaaatcatctcaggtctgtttaattttcttacaatctttctgaaatcagttctgccaataactgaatatgggcaggactagcatttaaagctgggatataacggtaagcttgtcctccagcagccataaaatgcttacgattggttatatcaatttcttccaacgtttccaaacaatcagcaacaaaacccggacaaataacagcaagctttttcttgccttgcttaggaagctgaataagggtttcatcggtataaggacgcgtccactcctcaggtccaaaacgtgattgataggatacctgccattgctcctcagataagccagcagcaaccgcaattaattgggctgtctgctggcagtgctctgtataataatccccttctatcacatatctttgcggaatgccatgaaaggaaaagagcaggtgctcattttcctgtaagcgtatagtctgggccagagcttgaatataggaaggtctttcataatagtgatgaataaagtcaaaaggaggtatatcttttttctttttcaaagattgggcaaaggcatcaaaaatggcggccgttgttgttgaggaatattgtggaaaaagtggtaaaacaatcattttagctactttttcctttagaaattcatcaaccacatctgaaatagaaggcttactgtaagccatagtagctctaactaaaaccccatgttcactctgatcaaaatgagcttgtagagctttttcttgaccgatggcattggcataaagaggggaaccttcatttgtccaaacatgttggtaaagaggttttacttttctgggacgaaagggaaggataaagctatacaagataggcttccataaaaatttaggatagtcaataactcgggaatccgctaaaaagggtttgagaaatttacgaatagctggcgcagttggatgctcaggtgtccctaagttaaccagtaaaacgccgattttttgttgagacataagagaatttatctttccttgaattttctaaaataagcatttttgatgaatcatcacctttaccaagatttctttttaaataggttctctttcttcttcctgcttttttcttaattgacgactttttcttaaaatactaatgacaaatattaaagaaagtaaggtaataaggctgccatagatgagtccttgtgggatataataaagttttatctgatgtttacctgacggcagcttaaaggctaacatagcattccaaacttcctgcgttttgaccgttttgccatctacttttacgtgccagccagcattataaggaatagaagtaaataaataattcttacctgaaacttgttttacttctcctgaaagagatagtgaagttactttttcaggattccatttagcaatatgaccttgcttcacgaaatttgtgaaactatcgtcattgaagcgatagagttgcaaacctgttaagttaagagaactattatctgttaaactgatttcaaaggtttgttcttggtctttgctgttggaagcaaggctccaaagctgtggggtacggtaacgatcaaaaaccgtgtaagcttgctcattcaaagtgaatttaagatgatttaaatctgtcgaatgaatttgtgaagaatacaaataatatgaattattatcctgtggtgtccaagtcaaacggatagtacccggacggtctgaagactgacgtttataaatttgctgtccattagcattatcagccaaagcaacattatctaaagacagagtagctgcttgataaggatcaagaagattttcaagattgtccgaaagaccatgataaatctgattttgattagcaacaacatcttccttatccaatttttcccttagcatagcaccatcacccgaaaaacccaaaccaaaaacagaagtattttctaacagtttagcatttcccagagtttgaataggatgataataattagccaaatcttttctggcagagtaagtccaagtagcattatccacataataacgtaaattaaccaaagcatctgttaaaggcgtaccgccaacatacatggaaatagctgttgaagaaggcagaccaagtcttcctaaaaattctaaattcttatattcaacactagatgtaaaatggttaacaccataataattataagtcagagaatcattccaagtattggcactgcttttttcaagacgtgccaaacctgatttaggcaactgtaagtttttgtaaaacgcctcctgcttactttcagcagccaaaacagaacttgggctatgccataaatttctgtcaatcgttattttagcattgatccccatatcaaccatgcttactaaaataacaaaagcaagctgccaggacttagacagttggaaccaaatcaagaacaagagtaaaattagagtaatgatcatgcccaattcctgccaaacggtgaccaaagtgtaagttttttccttaacagcaaaataaacataaacattggccaaaagagcaaggacgaaagtcgcaatcatttgcagacggctccaagatttgaccttttgcaaagcttgataagttaagattaagaaaacaggactcaacagccaagcattacggtagtaaaaaccaaccggcatttgtcccatatgccaaaaacggatagcagctgcattcgaaaaagctaaaacaagaaagatcaataataagaaaccgctgattttcttacgtaaggcgattctcttagtgaaaaagaaattaaacaagccaataaagccaagaacaccaacataaaaattaggcagagcattaaaatctccccattcttcaccactggccgcaccgggaaagaacttaattaaaagtctgatgggattataaagaaacgtaaaaacccaaggatcagcctctccgcctgcagcctttgtatctaagagagaataaaaaaccggtaaaagccaaatcgcactcaaacctattcccaaaagagaatagattagcaaacgcagcgactgctttgctttaaaaagaaaagctgatttttgagctaggatataataaaagctgtagaaaataacaaagatacaggccatataagccgtgtaaaattgaaccacaaacataagagccaaaaccaaggtatacttgatactgactttgccatctagaattttttccacaccaatcagcaaaagcggtaaaagaataatattatctaagaaattaggattgacctgattaacaataagaaaaccgctcaaaccatagatagcagctatacagacagccaataaacggtgacaatgggcttcataacgtttgtgaaggaaataatagaagctaagaccagaaaaaccttggcgcagcaaggttaccagaaaaactgataaattaagatatttagcaggtgccaaaccaatagctagactaaagggactgagactgttgaagccccaaacagatggcatcacaccaccaacccctttgtgccaagaccaaaagagagcaccaatatccatatgtctaaaagcatgtcctaaggcacgataaagggggatgtattgtaaagtataatcaccgctcatcaaagtttccttaccaaaaggataaagcttcatgacagcaaaaacgactgccatcactaacataggcaggcagaaagcagccaaaaatcctaaggtattcttaaaaggatccttttctgtattcttttgctcttctttttcagaagcaacagtctcctgatgacgcgcttgtgaacgatgcgcacgactgcgacttaaatgttccaaaggttcctgcctcatatcttgagttctttcatttactgccttgttgtctttttcttctcttgataccatcacatctccagtttactttcactaatcgttttcattgtaacataattcaaaagctttgttaatgtacctctagctgtatatcataaaatcgggatagctaccgataaatcagcattacctatcccgacttttttactctctaaatccattagggtactttttttgccagcgccaagagtcttggcacatccgttttaaatcatatcgggcatgccaattcagctctttctcagctttagaaacatcagcataagaaacagcaatatctcctgcacgcctgccaacgatttgataaggaatgggatgtccaacaatttctcccatttcttgaataagctctaaaacagaagttccttttccagttcctagattataaattgaaagacccgaaccagcaattagtttttgtaaagctgcaacatgacctctagcaagatcgacaacatgaatataatcacgaataccagtcccatctttggtatcataattaccaccaaaaacccgcaccctatctaattttccaagagcaacttggcttatataaggtaaaagattagttggcaaaccttgaggatcttcgcctaactcacctgaactgtgagcaccaatgggattaaaatagcgcaaaatgacaatattccaagcactatctgaaacagacacatccattaacacatcttcaatcatcatctttgtacgaccataaggagtcatcaccgaacgtggcgcctcttctgaaactggagcaggtgctttatttccataaacgctggctgaggatgaaaagatacaatttttacaggaaaactgctgcataacttgtaagagtgtaatggttcccgaaaaattgttagcataataatcaagcggaatagaagtagattcattcacaattttaagtcctgcgaaatggatgaccgcagtaatggcttccttttcaaaaatggcttcaagacttttcttatctctaatatctgcctgataaaaagtaaagtctttgccagtaatctctttaatggctgttaaacttttgaaactagaatgcagcaaattatccacaacaacaagctgataatcttggtttaataattcaacacaagtatgagaacccagataaccagcgccccctgttactagaattttcgtcattacaatagttcctcttttctagcaaaaacccttcttaagaaatagaacttcttttttctgatctagaatcctgccactttaacaaaatagtaagggcaatagaaatcactgaaacagcaattcccacaacaaaaccttgaggcataaaggacatttcaatacgatgtttgccacttgtaattggaaaggataataaacttccccaagcctcatcagtcttgacttttttaccgtctactttcactgtccaacccggattataaggaatactggtcatcatgacattgcttttatctgtaatttgaacatgtcctttaattaaggtatttgtccacttagtcactgtcatatcttgttttaagcggtcatcgataacttttttaatagctgtctgattagctctgacaagggccatgttagtcaagtcaagctgatcatcttgcgaagtttgcagctgtaaaaccatctcttgatttggtgtcttactggttaaattccaaagctgtacttgatcatagctttgtgagtaatgataccattgattattgagcataatggaaacatttcccattgatttgcgtaaactataaggagcttggaaataataagtatcatccgtttgcggtgtaaaggtaatcctaatcgtaccagcttgttttttatcaattcgtttgaaaatacggtgcccattttcattaacttcctgcatattaatcaactcaattttaggaataccgatatattcaaaatacttttgcttcttgccagacattgaagagagaataatattttgattagaaacaggattattaatcccaaacttaatattatgtgtcaaggtatttgttccaaaggctggtgagaggacatcaggattttcataaatgataaagcgtttattctcataaataggtttgtaatactctttaagatctgaacgtgtcgcatttcgattgaagaactgccagttagggtgtttttcaatgtccgttgcactgtaatctttacgatcaatatagtaacgaacgctgtaaagagcatctgttaaagccgttccgttggcataaaaggttgctgcattaccaccaacatctcccatcgagttaaacagattaatagttgatttttccatattggagctaaaggtacttaaaccgggataggaaaccaagaaaggatcgtttttagaatagagaaaactagagcctacacgataaaatcctgccttatttttcttcttgatgacatctgataattctttcatactcttagtgacatccgtaaatttataagcatcagcatagcccagagtcacttgagaaaggtaggcattgtagcccaactcaagcaccgtaacaagggctagaagagaccagacaagcttgcttttaggacgaagagccagataaatcaaaacaaaaagccaagttaagagagtaaggcaaacttgtgtcaataagagacccttatttaacaaataaagcgagactggaatagctaataaactagcagcaatcgcacacaaacgagcttctttgtattggtcaagccgcttccaagtataaacagcgagaccagcgaaaaaaacaaagactaaaagaagtatgaaagcttcatgtgaagtcacaaaatctgtcactatcttaggttgttttttcgcgatataggtataatcatgactgataacataataagccgaagcaaagctcaagataatccctactataaggcctttccagcccagatacttcctttctctaagagcttggtaagccaaaagaaccataaagaaagataaaatccatgagaaacgataaaagaaacctgctggattttgtcccatatgccaaattttattagcaaattcattaacaatagaaacaaagaaaagaagactaataaaagcagcaacaaccttgcgatatttgtgcgctttagcctgaacaaaataaaggaaaaagccgaccaaagcaagcgccccaacataaatattaggtaaattgggccccgctgaccaagaggattcattgtcaaaaccacctatcatcaattttgataagatatcaaaaggattaatttggagagcaaagctaaaagttaaaggattatcgtaagcacctttactgcgtaacagatttaaaaagataggatagagcaggaagaacactgaagtaattgccaaaattgaatagcaaatcacacgtaaaacaggtttaaagaaagcagttattttgatcttccaatcaccgatttctgccaacttcgatgctgcataataacaagtataaagggcaacgaacaaacaaatcatgtagcccatataaaaatgcaaaagcatggtcagagccaacactataatgtatttaaacggtttcctaccatctatcaactcttcaagactaataataactaaaggaagcatgatcatcgcatcataaaagataggattcatctgataagagacaatcatacctgaaagagcataggccgttgccataagaggaactagccaaggattataagagagcgccttgtaacgttttacgagtagataagcaaaactcaagcccatcgctccatagcgtaaccagatggttaaaaagactgcccatttaaactgcgtcaaaggaaataaaatataaaaaagattaaaaggactaattaaattgaagccccaaatcccaatcatagcaccgccaatagacttagaaaaagaataaaagagtcctgaccaatcacccgttaaaaccgttgccttcaaaaagccataaaggccgatatactgctgtccaaagtcaactgccattaaagtatttcttccaaaaggaaacgtatccataaaataccagacaaccaacataatcaacattggaagcaaggtacttgctagaagaaccttaaatttcccagctttcttaaaagatgatctttggttttcttgttttcttgaatgtctcatcccactaaatcctctttcgctttcttaatatttgtttcatctacaatataatgcggccgccgtttcacttcataataaattttcccaatatattcacccagaacacctatggaaatcaactgtacaccactaaaaagaataatagctgctaaagttgtaaaataaccgctgactaaaatttctggcttcacaaaataagcaataaacatcactaaaagatataagagagcaaagccaacgcaggctagcccaaactgaatacagatacgtaaaggtttatcattgaaagaaatgattccttgaaaagcataattcatggaacgcctaaaaccaaatttactttctcctgcttcacgaacttgattttgataagggataatcttttctttgaaaccaatccatgaaaaaattcctttagaaaaacgattatactcaggtaaggctaaaatagtatcaaccgccttacggctaaaaagtttgaactcagaaataccatctgttaactgcacatccatcaaatgattagcaaaacggtaaaacaaccttgcaaaaaaagtgctttgtttaggttctcccttacggtcacgctgaccgctgacaacatcataaccttccttaaaagctgtaacaaagcttggaatgagagcaggagggtgctgcaaatcgccatccatcaacataacagcatcaccagttgcatactttagtcctgataaaatagctccttcacgaccaaagttacgactaaaactgatgaaccgtacatgatgatcgttttgagccatttgtttcattaaacttaacgttttatctttactaccatcattgatataaaccaactcatactcatcaatagtatctggctgcattaactgcagctgtttggaaatttcactgtgggtcttctcaatcattttttcttcattataaaaagcgacgacgattgacagtttcatacaaatccttcccaataattatctgcttattaattatcttaaagctaaaaatgacagcaatcaactgtattttaccacaatttaaaagacttttcgaggcttttaaaattctgccttaaaatacctatatctctcacctaccttttagaccatttgaaaacaaaaatatcactgacgaacttacaagctaacaatcgtgtcaatcattcttatactcaaaaatagtctaggcaatagcttaagaaaatctgccgacactgagtttcctgtatcacgttctaagaagacttagttaaagaccttacactagtacgctgacaaaatgcatatcgctttcacctcctcacggcacaactgcctaaagacatattggataaggcaaactcaaaaaaattcctatacttttggagctaggaataaagtcaataaagctagtatcatcagtacaacaacctatcattttgatttctaaaaagcattaataacgtttagctctttgtcagtcagcaccttaaaggttagccttgtacaaacaataattttcattgatgaataagggtgttcatattataataaaaacattagtacaaatcagaaggagccattattgatgtctcaacatttatttactgcctttatacttactactcttgctggactctcgaccggaattggtagtttaattgcttttgtcaccaaacatacgaataaaacttttttatctgttagtttggggttttccgccggtgtcatgatttacgtttctatgattgagatttttccaacagctcaaaccattttgactaaagccatggataaaaaaagtggctcttggttaactgttttagctttttttggaggcatgcttttaattgctattattgataaattgattccatctgaagagaatccccacgagattaaaactattgaagaagaagaccaaaagccaactaaactaatgcgtatggggcttatgacagccattgctattgggattcataatttcccagaaggactggcgactttcatttctggtttacaagatgccagtgttgctattccaattgtcatcgccattgctattcataatattcctgagggaattgccgtatccgttccgatttatcaggcaacaggttctaagaaaaaagcctttacttattcttttctatctggtctagctgaacctttaggagccattattggctggtttctccttatgcctattatgaataatattgtctatggggctatcttttctgctgttgctggtattatggtctttatttctctagacgagttactgccagcagcagaagagtatggtaaacatcaccttgcaatctatggagttatttctggtatgcttatcatggctgttagtctcttactttttatttaacacaccgtttaaaaggatgtttaatgatgaaatttttaattcccactgctaaagaaataaaagaggataacaagccttatccccagcacttatctcagaaaagtcaaattcttgttaatcatatgaacgccttatctattgaagagctcgaaaagagctacaaggtcagtccgcaaatagctcaaacagaactactaaaatggcaagacataaaaaacggggaggctcttgcctaccctgctctctacttatttaatggactcatgtatcggcatatcaagcgccagcatttgactgtagaagaaaaagcctttcttaaagagaaagtttttatcacatcagcgctttatggtattattcctgccctgaaacccattgttccccatcgccttgacttcaatactaaagtaaaaatcaagggagaatctctaaagaactactggcgcaaaacttatgataactttgttttggacaatcctagtattgtgtcactgttatctagtgaatttgaagctgttttttcaccaaaattacgaaatcaattgataactcttagatttttggaaaatcaaaacggtcagttaaaatcccattccactatttccaaaaaagcacgcggagcctttttaacacaggtcattcagcaacaaacaaaaacggtagatgagctgaaaacaatcagttttaacggttttagctatcaggataacctatcggaacccttaaaattgatttttataaagcagagtaaatgaatgttaaattctatcatcatataaacaaaataagcccttctaaactgcaactcctttgatcaaagtttaggaggattttttctttctatatcagtccatctctgtcaatttgttcataggtttgtttgccatcattgagtttatcccaaatcacaacttgacctgaagctagcgattttggcacatcaatgatacgttgattggaagaacctcggaattgcagcattagatttttcttggatttatcaaaacgtccatccaccaaaatatcaagcaaattaagcatttccaatttatcaggagtttccagcattaattcttcccaagtatagcctgtccaagaccaaatatctttctccggaagctctttacgaatcctttttagtaaaggcaaaagaatacccgtattcaaaaagggttctccgcctaaaagcgttaaaccttgaacataaggctgtgctaaatcttccataatctgttcttccaattcctgtgtataaggaattcctgcatcaaaagaccaagttgcaacattataacagccttcacaatgaaacatgcaacctgctacataaagagaattacgcacgccttctccatcaacaaaattaaaggccttataatcaataatacgtcccttacttagttcttcactcttccactctcctggtttcggtgtgttccaagtcatccttcccctccaaatctatccaataacgctctatctgatttctgatatcttctaaaacaccaccattagccaaaataactgcccgactagctgcattatcattatgacaggtgatcagtacttttttaatattcttagctttagcttccaataagcccaagcgtaactgctctttagcatagcccttaccacgcgccgatggacgaatagaataaccaatgtgaccaccgcaactaactaaaaaattgttgagacgcaaacgaatatgtaaaaaacctattgccctgccactatcatcaaatgacacgaattgaatcgcaggtacaaaatttttaggcagtttaagtcccatctccttatctaagttgttttgcaaccattgatcataatcaaaacaatcacagtcagttttttcccaaaagccaccgtcatgagctgtttgcaattgttcaaactctatcatcatatccaaaatggcttctttatctcctaaagtcggtctacgtaattttaacataagaatccccttcaattctttatgctgaaaaatctattttttctttctaacttttttcaacaaagcctgcacacgtgcttttttatcatccttaacattcgaatacttctcatgaaatctttctacttgctgcattcctttataatctaattgatattttcccatggttacccttctgaaaaacgaaagtgagataaaagtccagttgaaatgcaaccggactttgcttcaaaagataatgttatttcctttaggacaacctatgccttgtgccccggatttttaatggttgaaccattcatgtgtttgacacgtgctgagatttccttatggcggccattcaccattggacgagcctgtgggttgccaagataaccacacgttctcttaacaacatcagcagttttagggtctgtattgccacaatttgggcacataaaaccacgttctgtcggtgtaaaatcgccttcaaaatcacacttatagcaatgatcaattggtgtatttgttcccagataaccgacacgatcataagcataatcccacaccgcttcaagtgcttttggattttgttgaagaacagggtattcacagtaatgaatgaaaccacctgtggcacctgcatccggatagtctttttcaaaatctaacttttcaaacggtgttggatttttgcgaacatcatagtggaaagaattcgtataatattctttatcagtgatatctttgatgataccaaacttttcagtatccaaacggcagaaacgatccgttaaactttcagatggtgttgaataaaccgaaaaatgataatcgtattcatttgaccacttgccacaaagatccttcatttgacgaacaatatcaatggtaaaatccttagcaacaggatttgattcccagttaccgccatagaagactgtcgctacttcataaagtccaatatatccaagtgaaacagtggcgcgacgttctttaaaaagttcatcaacagaatcatccttgccaagacgcttaccaaaagctccatactgataaagaatcggagcattagccggcgttgcctccttgacacgttcaacacgataaactagggcatctttagcaatagccattttttccttaaagatatcccaaaacttatcaatattcccatttgactcaagggcaatacgaggtaaattaaccgtaacaactccaagattcatacgacctgaattaacttcaacgccattttcatccttccatccttgaaggaaagaacggcagcccataggaaccttgaacgagcctgttaattcaataattttttcataagacagcatgtcaggatacatacgcttagtagcacattcaagcgctagtttcttaatatcatagttgggcgttcctggttctaagttcaatccgcgttttaaagtaaaaattaatttaggaaaaattgcggtacgatgttcactgcccaatcctttaatacggatgttaagaatcgctttttgaatctcgcgttcaaaccaatccttaccaagaccaaaaccaagcgatgtaaaaggtgtttgaccatttgatgtgaagagtgtgttaatttcatactctagactttgcatagcatcgtaaatatctttttttgtcttttcacgcgcataatcttcacgcttatcttcactgacccatttttcagcatcttttaaatgcttttgataatttaattctgcataaggagctaaagtttcatcaatacgatctgctgaacagccaccatactgactggaagcgacattcgcaataatttgtgaaatttgagctgtcgctgtttgaatagatttaggactttcaacctcagcattaccaatcttaaaacccgaatgcagcatacctttaaaatcaatcaagcagcagttagtcattggtgtataaggactgtagtccaaatcatgaaaatgaatatctcctttaagatgagcattggcaacatgttctggcagcattttaagcccaattgattttccaacaataccagctgttaaatcacgctgtgtattgaaaacatcactgtctttattggcgttctcgttaacaacagcttgatccttgttaattaatttatcaatggtaaagttgatatctgttgcctgagaacgctcaaaatcacgtttcgcacggtaattaatatattcctgagcgataacgtactctccagcctgcagcagctcatgctctacaatattttgaatttcataaattttaatattttcagtaaaacgttcataaatctcagcgacaacacgatcagcaatacctgataatttggcttcaataaaaggtgttaattctgtcacttgattacttgccctgacaatagcctgataaattttatccttatcaaaagcaacgtgacgtccatcacgtttaatcacgatgacatctggttttacaaaaatattttctttctcaagtgcaatcatacgtctttctccttacagaagctattataacataagaaagaaaaaaatcaatatattgtggtaaaaaaaaatttagacacaatatattgatataaaacctattttctctgataaactgtaaaatctgaactattctttaaggaaacaactttataattatttgaaaaattctgttttaaaaccgatggtaattgcttcgatttctcattaacagcaacataagtagcttcattttgtaaaagctcatcttctaatgctttacgatttgattgtttagccgtattaaccattggcaaagggaactgtgcactagagcgccgactagcgtcaaagtaaatttttgcactggaatcccatgcataaattcttgttttttcatctgtattttctctaatataatcagcaatttgagcacgttcctgatttaaatgataagaagaaatgtagtgaatactaggctgagctaaaccataagcaaataaaagacaaggaaggtagaaatgcctaagtaaaaaaagctcaaagactttatgcgatagacgtctatgttgttttcgccgacgtgatttacgctttaaagattccttatattcatcatcaagataaagaccagtcaagacaagaccaaaaggtaaaagcagcaaaaattgataggttgcaaaactctgtgataataaaataaaaatcaaactaaaaacaaaacttaaaaagacaatagatttaatcaagtcatcgcgatcattttcacgcttgatatgattgaaaaaagttaaagcacccatcagtaaacctgaagcaaagagaataaaaatttgaaagagaattgtcagtaaaatatcatctttcccaagagcaaaatgagtaaagtagtaagtcccagcttgagcgatataagatgacagaatttgcatatttaaaacaaaatagcccaaaatataaaatactaggataccaccaaaaacaatacaaagaaactgatagaatccacgagcatgctgatgatgcttcacattatagatacagataattactaaagacaccagccaaaagaaaagagtccgtggttcgattaaataagctaatgctcctgtcaagccataaataataaatccttcatctcttgtcaaacctgcaaaatatttggttaaaaaccaaagggacaagaacacaaaaggcatagcaaattgaacaggatacagccctccaaaacccagagcaaaattagccaaataaaagagcaatatagtattaatcgtcacctcttctttgccagtcatatgataaacaatcttataaagatagatacccgaaaagtaaaaactagcaaactggactaaaaccagccaaatactacctcctaaaagataactaagtgcaattaccgcgtagtaaagaaagccgcctgttgaaaaaatatcactatagggcaaatgattttgcgtcatcataaaacctgtataaagattttgagattgaagagcattgccaaaatcagtaaaaaagggcatggccacactaaaaaaactgacaaaaatactaaacatgacgatataaaaacgatgtaaagaactcactttaactgcgttttggtcagcactcaagtgagtgttagcatttgtttttttagttgtttctctccgataattgttttgtcttttatccaaacccattctccttgaaatgtcctattaaaagtataacaaaatctacttattagtcaatttatccaagataaagcaataagttaaaatatctctaaaatgatgcagagacttcctgtcatagtctttcaaaaactttttttcttgctgtgttaagctttctttcgttttcatgatatcacccttatttatttattcgtaaataaggcaaaaagaaaaagcctgatcatcagacatttctatcaatcttcatctaaaaaactattaaagacttcttcgatcataatccattcagcatcagcatcttctggaataggttgaagagccccttctgttccatcttcattttcagtaaatgaataggcctgaatttcaatttgaccatcagcatcttcttcagcacccgctggaaccaagagaacataattttttccaaattcctctttaccatcaatagtcaaaagaacttcgaacaaagtttcatttccttgttcatcaacaagcgtgataagatcatgctcttgttcatgattatgtgacatagttgcctcctgtttgaacattctaataagttattcaaaattatgacaataagctacaataatgtataacttaaagccttttaaaacatacgatccaaataattttgcaaaatcagctgagcagccaacttatcaataaccttttttcgcttaccgcgactaacatcagcctgctcaactagcattcgttcagcttgaacagtcgtcaaacgttcatcctgatattcaacaggtaaatcgaaaagttctttgattttcttaccataagcctgactagcctcaacacgcggaccacttgtattattcatatttttaggtaaaccaactacaaacttttcaaccttgtagtccttaaccaaatcagctagacgatcaaagccaaactctcctttagcttcattaataggaataatttcaagaccctgtgctgtaaaccccagtgggtcactaacagcaacaccaactgttttggaaccaacatccagtcctattattctcattttaaatcaatcccattcccttgcaaatagtaacgcactaattcttcaacaatttcgtcacgttcatattttcgaatttgatttcgagcgtcattatagcgaggcacataagcaggatccccacttaagacataacccacaatttgattgattggattataacctttttcttccaaagaacgatagacatgagtcaaggtttcgctaatttccttcttattaccatcgtcaaggttaaaacggaccgtttcatctgtaaatcccataataacaccttctttctcatagggaatatcatgttacattatatcttattttaagcattttcacaagaagaagaaccacttatcttaaattaagtaccgcttatccaaaaagtctggttactccccacaaaattctatatactaaaatcaagaaaggatgataactgatgaaagtaaaaattatcaaggattcaaactttaaggaacccttactccaaatctatacacgtcatattgataaacaaacgcaaagagtgattgattttattcaacaaagacctaatatcgtttatggttacaaaaataaatgcttagagtttatcccactagaaaaagtgattcgtattttcacggaaaacaaacaggtcttaattcaaacactaaccgatacctatttagctaaacaaagactctacttttttgagcaagaattaggaacaccttttattcgtatctcccaaggtgaaatcatcaatatcaaatatattaaacaattgaatttaaccatccgaggcagcattgaagtgactttcaaaaatggaacagtcagtttcgtggctaggcgaagtttgaaacgcttcaaagaacaattaaatctttaatggaggcacatcatgaaaatactcaaacagattattacttacagttttattggtataggaatcggttctttaatgaattatttcatagccatcttctttttcccaaatagtaatccacttggtgtcccaagttttgttcaacttttttcatcagtttcacaggcaacagcagtccaacttttcatttttgctcttctaggcgttttacaaggatttgctagcagcctctttaaaaatgaaaaactcagtctactaaccacaagcttgattcactatttattcattgtcctaccacttctcttagccggatcttatttacactggttttacatgactcggaaatatttcgttttttctttccttttagtttctattatttatatactcatttacttattctgctattttgaaaataaaaaaaacattcaaaaaatcaataagaagctgcatcaaatataatctttgaattgttttagttttaatattaggcagatgcaagtttgatggcaaacagttacctcattaagtaaagaaaagtcccacaaaattttctctagcatttgtattattagtttgtgaatatcaggattattatctatttggtgattaaactttttgacttcccttaaactaaaatttttctctcttttgctgcttaacataagattaaatgattctcgtgttaatcgtaaaaaattactcaccttaacttaataagctaaggagtctgcgtatcagactgacaagtccctttcaacatcatactatagttatagtacaagcttaaattactttctttttctataagcaaaaaggaagaacaaaagtataactattccaactaaaatacctgaaaaaggcatcgtaggttcaaaaacgagaagagacaaacgataaggagccgttaatgcttcccttataccaacgccttgtttaacatctagaataacaaaagcaccataagtaaaagtaaaaaagataataacatatctaacaaagctgagtaagaccaagggccaaccctctaattttgttcgtgagagcaacagtaaaagaccaaacaaataagcaatgggaacaatgaacaaccattgagacgaatgcaaataaagcacaatcaaagagattatcagtcctaatgctgttataagtttaaaatacagccaaaagggagccaaccttttttctatctttgtcttatcacttcttttcatattcttattctccttattattcagtatagcatattaaaggaaaattaagcaagaagtgaaaaacttaatcacaggataaacttctagtcatcacataacatctcaaaacgcgacaacaataaaattaccatattccctaattgccgatttagttatctaacaacgattggggaacatggcaatatccttagagtttttcgaacgaaatatttgatgttaataaaatgacttttcattacttcgaacattcttataaagctgcccgtaaacgagctgctgtgttttcaacattacgaatagaacgcggtaaaaaagctcgaatatcatcttccttataacctatctgaagacgcttgtcatcaattaaaatcggactttttaaaattcgcggattttcttgaatgagatcaataacttcattgacactcaagtcatcaatattgcaatggagagccttagcatagcggtttttagaggatacaatgctttcaattccattttctgtttttgaaaggatatttaaaatttcttctttacttaaaggatcttttgctaagttttgttctttataagggagttgatgagcattaagccatgttttcgctttcttacagcttgtacagcttgaaattgtataaattttaatcatgtttaaatctctctttccttacaggataatattatcttagcatagcttattaaataaagagtcggtcttgggacctatttttatttaatcttcaagctcaattgtatcatccagctctaaaacaaggtttttgtcagctttctcatcagtttctttttctttagaagactgtttttcttcagtattatcttcctcaattaaaccatattgaacacgcactttatgatcgatgtcatcaaaaatttctggattatcagctaggaattttttagcattttcagaaccttgcccaattttttcaccattataagagtaccaagctccagctttttggataattcccaaatcactggcaatcttaactaattcacctgtacgagaaatgccttcaccatatataatttctacaaaagcttccttaaatggtggagcaactttatttttaacaactttaattttggtctctttaccaatattgctgtctttttgttccccggttcctttaatttgagtattgccacggacatcaagacgcacagaagaataaaacttcaaggcacgcccgccaggggttgtttctggattaccaaacataataccaactttttcccgcaattgattaataaaaatagcaatggtttttgttttattgattgaagctgataatttacgcatcgcttgactcatcatgcgtgcttgtaagccaacatgactatcaccaatatctccgtcaatctccgcacgtggtactaaagctgccactgagtcaacaacaactaaatcaacagcgccagaatcaatcaatttccctgcaatttcaagaccctgttctcctgaatctggttgtgaaagcaaaagctcatcaatattaacgccaagagcagcagcataggctggatcaagggcatgttctgcatcaatgaaagcggcaataccgccatctttttgcgcctgagcaacagcatgaagagcgacagttgtcttaccagaagattctggcccgtaaatctcaacgatacgcccttttggataaccgcctgccccaagagcaatatcaagagccagacttcctgaactcatcacctgaaccttttgttcagcgcgttcacccagacgcataactgcacctttaccaaaatctttttcgatgtttttcaaagcatcatcaagagctttcttacgctcatcaccaaattttttcgttatttcttctgtcttttttattcttttggccaatctttttctcctattctatgttttaaagccgtcttttcattatactaaatttttatgagataataaagtttgacgtactaaattaaaagcatgtaaaacagcgatataacgcacatcagaccgactgcgtccgccaattaacactttgattgccattgttcttttggaacttgacaaaccgataaaaactgtccctgccggctgaccttctaagctatccggacctgcaactcctgttaaagaaacagccaaatctgcttgagtcagctggcgggagcgctctgccatcttttcagcagtaaaagcactaacaaccccatgaagttggagatcttcaaagggaatacctagcattctagccttctcttctatactgtaagttataaaacctcccttaaagatatcagatgctcctgcaaaatctgctaatcttgcctgaaaaaggcctgctgttaaactttcagctgctgtaatcgttttacccttttccttaagcagatcaaatacaacctgtggtaatgaattttcttcaccataaccataaaaataatcagccaagttatcaatagttacaattttcttttccaacttatctaacttactatctgcttctttctgcctatgggcttttgttgataaacgtattgttacctcgcctgtcttagcataaggagcaattgtgggatctgtttgctccgctattaagtcatgcaacaaggtcactagatgactctcaccaataccaaaaaagcgtaacacacgagaataaagcttctcagaagtttttgataaataagggagtaactctttgttaaccataggcttcaattcgctaggcggaccaggtaatacaacataagtcactccatctgcctccaaaagccccccaactgctaagcctgttttattagataaaggctgacttcctgctataatctgcgcctgacattcattatttggtgtgcgcatagatgttggacgtgatgcaaaaaattcatctagacgttcttgagctgttttatcaaataccaattctcttttcaaaaattttgctagggtttgttttgttaaatcatcttctgttggtcccaaaccaccgcaaagtacaattaaatcactacgttcctttgcaattttcaaaacagataaaaggcgttcttcattatcaccaactgctgtttgaaaataaacatcaattcctaattctgcgaatttttctgataaaaattgactattagtattaacaatttgtcctgttaaaatttctgttccaacagcaataatctcagatttcattctaacctcctcaatattatattcgtaaaagattgaccatattatagcacaaatccctctaaattttttagaggggttttcaaataatggacagcagaactggtttgtcaaataaattgagctagttaagcctcttagtgaaaatgtcttattttttagggttaaaatcacaatcaacttcgtgatcattaattaaacctgctgcctgtaaataagaataaatgcaaacaggaccaacaaatttaaagcccttcttttttaaatccttagcaagccttgctgataaattcgtttgagcaggtatactttgacagttcttgacaaaattgtcaattggtgtaaagttcacccaagaccaaagataatgatcaaaacttccaaatgttttctgtatagctaaaaacgcctgtgcgttatgacgtgttgcataaacttttctgcgattacgaacaaccttcggattttttaaaatctcttccaatgcttcatcagacatagcagctactttatcaatttcataatgatgaaaaacagatttaaaagcctcacgtttgttgagaatagtttcccaagaaagtccagcttgataagtttctaaacacagtaattcgaataatctttgctcatcatgcaatggcttcccccattcctcatcatgataaacaacatacaaaggattgctttcttttacccaactgcaacgctccattattattcccttcatatacatagagtttttataaattatctattctcaaacgagcagattgatacagatactctaaaactactatttcatcaacatttttagagcagatttaatataattttctgccgtatcagtcgttccttcaaaaaatttttctatcttcttaagttcatttgttttgtaaccaagagccaaaagtgcttcaaccgcctcttcaagttcttgattattattaatagtgctcactttgcttttatcagttgagacttcattaatatctacaaatttacctgctaaatcaagcaccatttgttgagctgttttcttcccaattttagggaatttcatcaaatagtttacatcactgtggtcaatagctttaaccaaaccttcattatcatcagccgcaataatagctaatgctgaagttggaccgattcctgaaacagagataagattaagaaaaaccgccttttcatcctcagtatgaaaaccataaagaagatgggcatcttcacggacaacatggtgaatataaatttgaatagcttgatttatctgattagaaaaactataaggattggcaacattaattacataacccaaaccgccagcttctaaaacaatatatttagctgtaattttggttaaattacctttaatataatcgtacatcatttctccctttattgcataatagtatagcacaaattaatacgaaaggaaaaatcagttacaaatattgacttgctgatctactaataagtaaaaagaacttgccatttacttacctccaaaaaagtttacaatatattgacatattctttacaacataaataagtaatctagctttatctcagtattttcctaattctctcaaactagtatggttttcctgaatgcgacgaaacatcttttccatatcagcttttgtgaaatttacaagcacaggacgtccatgaggacaattgtaaggatttttgcactgtgataattgaattaagagatttctggcagaataatcatccaaagtatgattagccttgatagaacgcttgcaagacatcataatagctaattccgctcgatatttcttaatggagacttcatttgtcaacagcaacatgtcacacatctcataaacggctgattcaatttctttttcctgtaaccaaataggatgttccctcaaaataaaagtattctctccatagttttctaagtgaattcccacctcatttaaaatgctcattttttcttgtaaggtcataaaatcattagcaggaaattcaaaaagataaggtactaaaagctgctgtaaactattgtctacttctccaattttatcacgataatattcatatttaacacgttcttgagcagcatgttgatctataatataaagccccccttcaccttgagcaaagaggtaagttccatgcatttgaccaaaatattctaactcaggaaaagttgacttttcttcattttctagactttcaacaattctactaagctgtcgcttttgttgcttatctgtcatagtaagacttggatgctctttgttttcacaagttctcatttgacgttgagcatattttacactactatgtcctgatacattatcagtaatatttacagctttatcaactactgtaaactcgcttgatgcttctgaaactgtcgtttctttgagaaagaagtcattttgagtcttatcatagtaaagatttgattgtttaagaggaagctgtgtttgttcaaacttttgtttcttgtttgtgctagttttagcaagattttccaaagcatcaggaattaactcttgttctcttaaactatctgcaattgccgaactaatgagattcattaactctttttctttagaaatgcgaacttcctgcttagttggatgaacattaacatctgctaaataagggtcaatctgaatatcaataacagcaattggaaaacgtcccaccattaattttgaaccataaccatcaagaatagcacgattgagcaaaaaatttttgatataacgcccattaataagaatggtaatataattgcgattagctcgtgttaattcaggcaaactaatataaccagatacctcaaaatcaagatctgcatttgaaatttcgaccatttttttagcagtggttaccccataaatacccgctaaagcttgacgcagatcgcctttacctgccgtctttgttaaatcacggccatcattaataagcgtgaaagcaatttcgggatgcgccaagctaagacggttaatgacatcaataatatgagcaagctctgcctgcaaacttttcatatatttaaggcgagcaggggtattgaagaaaagattttcaacactcactttggttccaataggggtactaatggcttcttctttttcaattttacctccatttgcgattactaaagtgccatgtatttccccttttgttgctgtttttaatgttagtctgctaatagaagcaattgatggaagggcctcacctctaaaacctaaggtcctaattctaaaaagatcggattgttttttaatcttactagttgcatgacgacgtaagctcataattacatctgcttgttctattccctgaccattatcagtcacttgaatttttttcagtcctgattcttcaatttctattgtaatttggctgctatcagcgtcaatagcattctcaactagttcttttacgacactagctggtctttcaataacctctccagcagcaatttgattggctaaaacttctggcagttcaataatttttgacataagtcacctcactaaaattgtgtttattataccataaattaaaagagcaatcttaattgagattactctgtttgtgtcaagttttcctcggaaaggtttcaaaagtcctaaatctattttctaagttggccgattggaatgctcgttgcatcattcaaatcgatgcttgtctgcggaattctatgaggcttgtgcgacagccttttaaaaacttgtcgatatagccacatctcaatcagaccttcagaacgactctgaacacctttcttcgttacaagaaacacctcatcaacaccatccagctttcctattcaaatgccagacttgaagcaaccaacaagctcatcaaagatatcaaagccaatgcctttggatttaggaacttggacaattttaaaaaacgaattttcctcattttgaacatcacaaaagagaagattaagaggtcctcttttgactgtcactataagtcacccactacagttgacacgagccatttataatagttccttcaaatcaaataaggcattcatggattctcttggtgttaaattggtaaggtccaactgtttcaattttttgattaattcttcataattattatcaatagcaaaaagtgacaactgctcttccacaggttggctttctttggtctcgtttttaagattgactgagacagctgcactcattttttctaaatcaactaatatgtgatcagctcgattaagtaaatctttaggcaagccggcaattttagcaacatggattccataagatttatcagctggtccatcagcaattttatgaagaaaagtgacctctccatctttttcaagagtagcaacatgtacattgacaagacttgtcaatctagttgacaagtctgtcaactcatgataatgggtagcaaatagcgttttagctccaactttattatgaatatactcaataatagcctgtgctaaagccataccatcataagttgctgtaccacgtcctaattcatcaaataaaatgagtgaattaggtgtcgctgccttgatagcatgattagcttccatcatctctaccataaaggtggactgtcctgaaatcaaatcatctgcagcaccaatacgtgtaaaaatagcatcaaaaatcggcaaatcagctgaatcagctgctacaaaagaacctaattgagccataataactgtcagagctaattgccgcatgtaagttgacttaccgctcatattaggtccagtaatcagttgaatactagtcttttggtcaaaattgatagtattgggaatatattcttggcttcccataaccttctcaacaacagcatggcgaccattttcaatactgatttcctgctgatgattaaaagaaggtctgacataatgattattctcagctactactgctaaactttgtaaaacatcaacagtcgctagactcttggccagattttgaagacgctcaatataagattcaacctgtgatctgatacgcatgaaaatatcatattctaaattggctgattcttcacgcgcttctaacatttcaccttcaatttttgcaagctctgctgtcccaaagcgctcagaatttttaagcgttgcctttctaaagaagtaatctggtactaaagacaaattagagttggtgacatggaaataataaccgtcttttttgttataatcaatcttcaaggttgagatgccgcttttctgacgttccttagtctcaatgtcagcaatccaactcgtcccttcgcgcattaccgttcgatacttatctaaagtttcatcaaacccctctcgaatcataccgccttctgtaatagttataggtgcattagagtcaatagccgaacgaatcaatgcttccaattctggaagagtgtcaatttgattaattaggctttccaaactagaactggcaaaactttcaagaatagtcttaatgacaggaacttgacttaaggtctgacccaattgcaataaatccttaggattggccttcccaaatgaaacacggctggccaaacgttcaatatcataaacaccttttaagctgtcactaagatcactgcgctcaaaaaagtgatctagaaaagtctgaataatatcttgacgtttactgataaggcttgaactgaccaaaggacgatcaatccaagttcgcaaaaggcgtgtccccatagctgtttttgtctcatctaaaagccagtagagactgccgtgttttttcccgcttctggcattttctaacagatccaagctagattttgtagcataagccatctgtaagtaatctttaatttcataatgcaccaacttttgcaaatgactcaactcacgtttttgtgtgttatgaacatattgcaagagtttgccagctgcagcaagttctattgcttttaattgatcatccaataaatgtacatcgtcatagacagttttttcaaaagataagagcaggttcatctgcttacgaaaaagctgttcttcattctcactcagttcaaaaccaataactaattcacgcgtcttgagattgaggacttcgcttctcactgctggcaaatctgctaatgttgtcgcataaaattccccagtagataaatccatgtaagaaaggccaaactgactgccatcagtatccagagagactaaaaaattattagcactgtctggcttagttgaatcaacaacagtacccggggtaatcacttgaaccacttcacgtttgacaacgccaacagcttttttagggtcttccatctgctcagcaatggcaaccttataacccaaatcaatcaaaacatcaatatactgttgagctgaatgataagggacaccagccatcggaataggattgtcagcatttttattacgacttgttaagctaatttctaaaatttgagcagccttgatagcatcatcataaaatagttcataaaaatctcccatgcggaaaagcaaaaaagcatctggatagtcttttttgatatccaaatactgctgcattcctggagagagtttttccttagtcatttcctaactcctcatttattttctcttctagagtcttggttacatattgtaaaagatcgctggcatcctgcattttggctcgataatcttggacaatgggaagcttatccaaactctctcccattttttgcgccttttgatcagcttctttttgagctttacttttttcaatcctttgaaaaagaacagcgtcttgttgatagcctttcatatcatgtgctactttgtttaactccggtaaggatttaatctttttttcaacagcttgaaaagcttgcacactgtcatgttcctgcaaaagctctattaactgatttaaggcttcttcaaatgagatcataagtttgaaagaacatcgctttctaactggctggcaatttcttcatttttacaaataaccaaaagggtatctgcaccagcaacagttccaagaatttcagaatgagactccgaatcaatcaaatttgccaaaacatctgcctctcccaagttggtatgaaaaactaaaagcgcatctgttcggaaaaccttcttaatataataaagcgcagcaggcgtaaaaatagtcgaaccattttctggtatttcataatataggtatccttctttatcacgtgatttaaaaagacctaattctcgcatatctcgtgataatgtcgcctgagtaacaaaaactttttctaattcaagttgatgcttcaattcttcttgagtgcctatatgttttgagcgtatgatttgttttattttattttgacgtgataatttattcataacaattcctacatatattttttataccatacttcaataatatgatgatttctttttaacaaaaaagttcatttagcttatactgcaagtgaaaaaatgcagaaatcatctaaatgaaccacttacattatcaagcactcttaaataagagtccaattgatttttatactttaaaatatgtgatatgttgctttaaaatgtatctggtactatcctattgatgatatctcaatgagatgtcctagcttgatcacaatacgaagctgtatgagtgatttaactattagataattgaaaaacgtaaagggtatattactttcagaacagctttttactctgacaatctaaatattctcaactctataagtatgatttagtccattataacataattctttaacatagttctactgataagataaacaaaacacggcaaacgcatgaaaggtttctccgaatgttttggtgccttgaagtgacgacatttcttaaacggatttcgtgaagccttaataagcgcgacagcttttgacataaaatttttatttgtgcgctgttagtagccacaaaggattcatataaatcaacaggaatataaaagtattcaatatcagtaatagctcttgctgaaaaatcataaattttttctaaaaacataccgccatatggaaacattgtattatgcttcacataatcagtatataaaaaggaaccggagctatccgtatcttctaacttcacataaccagacttaagtaaaaataatttatcacgattatctcctttaaaaaataaaatatgatttttaggtgcttttcttaaacgtgtcgctgccattaattggtcaaagcgatctatagacaaatactgaaaatcctctaaatttcgcaacatttggtaatcatttttagatattaacatcttatcactctccttatcgttgttatcaagcttattattaattaatcattaattatggatgcactttatccagtatcgtttggctgctgctaccctttgaatatttctgagcggttattctcaataaaatctaatacagactgcaaacctgttattttctcactatccaataattcaataacaataaacgcatttttagttttattataatcatgatgcgttcgccatctctccaattaagatatctacaaacagcacctttatcatctctatagcataattcaccagctagagtagaagaatttttcgagttctcaattaaataaaattatccccaccttctgtcatttctaatctcaaatcaacttcaaaaggttcactgtcctccgctccaactagtaagtaaacttgcagcattataaatatctactaaaggatttatactgcctatcagcttgttgttgctgacccgttttagtaatgcttcaatactcgaatatgctctttttagttttaaatctttgataagcttttctataaacctgtatttccacattatcactaaagttaccttcaacgaggtaagtcttagccagctcattactttccttaagtaattcgataataggttttggtgatagttcctaagattgaaaattttttaataagacaataccaattttagcttgtggaaacaattctcaaaatgaatctgaaacaataaattttggcatataaaacaatctccttttcctttattataacttgtttttaagcgtgaacaaattaaaaacctatcctttttccgtgggttaacagattgctaatatttgtcttaacaattcaatattgtatgatataataaaatggagtggctgttttatgacataaggaggcagaattaattgaataaaaaagaagtccgacataaattaattctctctttaatctctgaaaaaaagattaatacccaacaagaattacaatctgaactcttaaaaaatggagtcgtagtcacacaggctacactttcaagagatattaaagagttacatttaattaaaacatccggtaagcactcccaatatgaggttcataaaatttctccaacccattgggaagaaaggctgcgattttatatggaagatgctttagttatgttaaagcctgtccaaaaccaagtgatattgaaaacactgccgggtctagcccaatcatttggctcaatactagattccatgcagttagttgaaattacagcaacagtttgtggtgatgatacctgtcttattatttgtaaagataaggaaacagcacttaaatgttttgaccatctatgccagtatactcctctgttctttttcagcaatgaataaaatttattaagctatttttataataacctgtttactcattatctaaaattttcaactcataccataaacactttattaattatatttaggagaaacaaaaatgaatcataacagattaattgcaaaagaaattgcagcaatcgttcctgctttagagcaggaaactattttaaatttactggaaaaacccaagaaatctagtatgggagatttagcttttccaacatttagtttagctaaaacgatgcgcaaagctccgcaaatcattgccagtgaacttgtcggtcaaattaataatagctattttgagaaggtcgaagctgtcggcccttatattaatttttttcttaataagtcagaaatctcagctcaagtattaaaagaagtcattaaaaaaagggaagattacgctcaagcagccattggtcaaggccgcaatattgttattgatctttctagtcctaatattgctaaacctttttctattggacatctacgctccactgttatcggcgatgctttatctaatattttccaaaaattaggctatgagaccgttaaaatcaatcatttaggtgactgggggaaacaattcggcttactgattgttgcctataaaaaatggggaagtgaagaagcagttagagcccatcctattgatgaacttttaaagctctatgttcggattaatgctgaaactaaaaaccatccagaacttgatgaagaagcccgcgaatggttccgtaaactcgaaaacaatgatgaggaagcccttgcactttggcaatggttccgcgatgaaagcttaatggaattcaatcgtctttatgctgagcttggtatagattttgatagctacaatggtgaagctttttacaatgataaaatggaagaggttgtccaattactagccgagaagggacttttagaagaatctaaaggagctcaagttgttaaccttgaaaaatacggcattgaacaccctgctcttattaagaaatctgatggtgctactctctatattacccgcgatttggcagcagccatttatcgcaaacgtacctatgactttgctaaagctatctatgttgtcggtcaggaacaaactgctcatttcaagcaattaaaagctgtattagctgaaatgggctatgcttggagtaaagatatccagcatgtctcttttggccttgttactaaaaatggtcaaaaattatccacccgcaaaggaaatgttatcttacttgagccaacaattgccgaagctgtcaaacgctctttagcgcaaattgatactaaaaaccctgatttagttaataaagaagccgttgcccatgctgttggtgtaggagcgataaaattctatgaccttaaaacagaccgaacaaatggctatgattttgatcttgaagctatggtctcttttgaaggcgaaacaggtccttatgttcaatatgctcatgcccgtattcaatctatccttagaaaagctgattttcagcctcaggcagcagaaaactatcagttaaatgacactgaaagttgggagattattaaactcattcaggattttccaaataccatcgttaaagcagctgataattttgagccctcccttatcgctaggtttgctattcacttagcacaaagctttaacaaatattatgcacacacacgcattcttgatgatagccctgaacgtgacagccgtcttgcacttagttatgccaccgcaactgttctcaaagaagccttagcccttctgggtgttgaggcacctaatgaaatgtaagcattataataagctgttggaatatatattccaacagcttattttttctatttataggctagtttgcgttcacgcttactaacaataaagtcaggactaataatttcttcaacatttaaaatcgaaatgaaggcatctggatcaagtttttccatcatttcctttaataacctaacatctgtaggatttaaagcaacatatagaacatttttttctttacctgaataagcaccttgaccttttaaataagtagcgcctcgattgagttcttcaagaatggcttcagccacttcttcatgcttatcagtaatgatcaagactcctcgaacagaatagccaccattttggactaaaataaccacttgactaaacataaagctagcaatcagagcatacatcatttgaggaatggagacataagtcaaagataagagcataacaaaaatatcaaaaattaataaagcctgacccaattgaataccatacttatcctccataacacgagcaataatatctgaaccaccggtagtccccccataacgaaaaacaattccattaccaatacctgcacagataccagccactaaagcgacgactagataatcatgctgtaaatcaatataaagagggattttttgaaagatatagacaaaaaagtacatcaacgttgttccataaatggtgtaaaccatcattttgcgaccaaaaaaataaattccaaacaacagtaaaggcaagttaaatagatagccagtataagttggattgataccaaagagggcatgaaaaactaaagttaaaccggccatacctccctcagcaatatgatttgtcatattaaaattgacaaaaccaaaagcataaatggctacacctaaggcaataaaaataaaattttttagacgaagagtataatctattttcattgtatctccttaaattatcaacattaatatttaatcttcttcaacaaaacggccaataatattaacattatctgctacagaaacaaaagcatttttatcagtcttcttcataatatatttgaagtcattaaattcagcacgtgtgataatagtaacaagaatagctttatgttcatggttgtaagttccttcagcatcattgataatggtaacaccacggtgtaatttatgatgaatcatccgaataactcgatcaggcctgctagtgacaatcattgcctgcattttcttttgtttaacaaaaacagcatcagtcatctgactggatacaaaaatggtcaccatagaataaagagcatactgccaaccaaaagtcattcctgcaattatcataatcaaaatattgacaatcagagaaactgtaccaactttacggcctgttttcttacgaaccaaaagactgataatatcagtaccaccactagacacattattgcgaagggcaaaacctattcccgttcccataaccaaaccaccaaaaatggcattcatcatcggatcgggtgttaaggtcatttgaggaatgaactgaataaagagagagctcaaagttactgtaataaaagtaaaaacagtaaatttatgaccaatcatataccaagctataatcaaaagcggtatattgatagcataaaaagttactgaaacaggaatagtcaatccaaaatacttaacagacagagtcgagacaatctgagctaaacctgtggcaccactggcatagacattcccaggctgaaagaaaaaattaacagcaatagatgacaacaaagcataaataatagagccagaaatacgctcgccatatttctctcttgaaatagaggacaggacattaatgacctgatagcgtttcgctaaattctttatacgatgcttaaaaatgagggtaaatttattcttgttcattgttctttactgcattcttgtttacttgcaaataaagctcatcaagttgtttatcagaaactaaacttggggcttgtgtcattggatctgaagctttattattcttaggaaaggcaatcacttcacgaatattctcttttcctgctaaaagcataacaaatcgatccaatccaagcgctagtcctccatgaggcggaaaaccataatccatagcttccagtaaaaagccaaattgtttttgagcgctttcttttgtaaatccaagcgccttgaacatacgttcttgtgtctctctctgattgatacgaagactacccccgccaagctcataaccattaagaacaatgtcatatgcaacagcacgaaccttgctgagatcaccttcaagttcagcaaccgtatcttcttgcggtaaagtgaaaggatggtgagcacttgtatagcgattttcttcctcagaccattcaaacattggccaatccacaacccataagaaattaaatttcgaatggtctataaggtttagttcttttgccaagtggttacgcagagcaccaagactaccatttgctatttcaagatcatctgctacaaaaaacactaaatcatttgcttcaagctgtaaacgttctatcaactcatcttcaatagttgtcaaaaacttagcaataggaccacctattttgccatcattatatttaacccaagcaagaccctttgcaccaaatggctttacaatatctgtcaacttatcaattgctttgcgagaatagctatttgcagcatttttagcaacaatagcttttacagcaggagcctgtgagaatactttgaaatcaatattctttacaagatctgtcaagtcctgtaaagtcatttcaaagcgagtatccggtttatcagaaccataattgttcattgctgtatcataagatatttggggaagtggtaattgcaactctatgcccttgacttccttcatgacacatgcaatcaatctttctgtgatttcttgaatttcttgttcagataaaaaggaagtttccaaatcaacttgtgtaaattcaggttgacggtctccacgtaagtcttcatcacgaaaacatttgacaatttggtaataacgatcaaaacctgcattcattaaaagctgtttggtaatctgcggactttgaggaagagcataaaaatgccctcgactcatacggcttggtactaaataatcacgtgctccttctggtgttgacttggcaagcataggtgtctcaacatctatgaaatccaaatcatccagataattgcggataacatgtgtgaccttagcacgtaacttaaaatttttcagcatttctggacgacgaagatcgaggtaacgataacgcaaacgtgtgtcatcattgacttcaattttatccttaatttcaaagggcggtgtttgtgaagcatttaaaatcgttaactgcgtcacctgcatttcgacgcaacccgttggtaaattatcattagcttgatcacgctccacaatcatccctgtcacttcgataacatactcactccgcaagctttcagcacttttaacaacagtattactggcagttttaggattaatgactagttgcacaatgccttcgcgatcgcgcaaatcaataaaaataagacctcctaaatcacgccggcgagccacccagcctttaagggttaactcttgtccgatgtgttctgaacgcacagcaccagcatacatagaacgtttcataataactccctttctctaactttatttccctatctattttagcacaaaaaccgttaaataaaagtggcttcactgaaaaatagtaagcataattaaaggatttcaagctttttaaccagctaaaataaaaactcttaaaaatactgacacaacagcaagtttaagagtttatcaacattatatttccagccttagctgcctttttaaggttaagcaggattgctctatggtctgtctgaacctaattgtttaaaaacactagcaaaatctgttttaatttcctcaaaactaacagcaatttcttgtcgtgtgaagttatttttaactgcaacttgtccagtttcaacttcactctcacctaaagtcatgatcaatttcgttttaaaaacatctgccgatttaaattgtgctttaattttacgaccaagataatcacgttctgccgaaaaaccttgtttacgaatagcttgaataagttctaaagccgtactattagcagctgcaccaagtacagctatatagacatctaaactgttatctactggcagattaatcttttgtttgtcaataaccaataaaagtcgctccaaaccaagaccaaatccgaatccagctgtcgcaggaccaccaaagtattcgacaagactgtcataccgaccgccagcgcaaagcgttaattcacttttatcaacttgagtaataaattcaaaaatcgtgtggttataatagtcaagaccacgaaccatattggtatcaataacataaggaatgtcaagtacctctaacatatcacgtacaccctgaaaatgcgcttgtgagtcatcatccaaataatctaagatagacggtgcattttcaacagcttctttatcttctttttctttagaatctagtacccgcaagggattttcttctaagcggcgctgtgaatctttggacagtttgtctttcatagggatcagataatcaatcaaagcctgacgataagccttgcgactctctttatttcctaaactattaaggtgcaaagtgacatctttgatacctagctcgttgaaaagctgataagccatggcaatggtttctgcatcaatggcaggattgttagagccaaaacattcaactcctaactgatgaaattcacgtaagcgtcctgcctgaggccgctcatagcgaaacatggaaccaatataaaaaactttaacaggtttttgtacctcgggcgcaaaaagtttgttttccacataagaacgaacaacaggagctgttccttctgggcgtagtgtgatgtgacgatctcccttatcatggaaatcatacatttcctttgttacaatatctgtcgtatcaccaacagaacgactaatgacctcatagtgttcaaacatgggcgttctaatttcaccgtaatgatattttttaaaagttttacgcgcaatgttttcgacatactgccatttaactgtctcttgaggcagaatatcttgtgttccttttggtttttgtaatgtcatattatgatataaaaaggcatttaacagtcaaagcaaaggtgtcattacaataatatatctttaatatacaaaataatgaatccttttgcacagacttcaagccaaatttgaatcctttcttatattccttacttctatttctgttctattttaccacaaaaacaacagagcagacagccaaaatgctttactttcttttttataaaatgtctattaaaaataaattaatgtattgattttccttagaaatagagctataatgccttattgataaaatttcaggaggaaaaaagtgtttaaaactttaaaaactttactattaggggaacccttaaaatctgaattagaaggagatagccatgcattaacaaaattgcaagcattggctatgttgtcaagcgatgctttatcatctatcgcttacggacccgagcaagttattttagttttgatagctttatcagaaggagctatttggtggtctttgccaattggcattggagtactcgttttattgattagtttaacaatttcttacagtcagattattcacgcctaccctaatggcggtggtgcttacatggtatcatcagacaatctgtctccttctatggggctcttagcaggcgggagtctgctgattgattatatgctgacagttgccgtgtcagtctcatctggagcagatgctatcacgtcagccttcccagcatttaaagatagcaatcttgaaatttcaattgttttggttcttattttaatgcttatgaatctacgcggtctgcgtgaatcagctacggcactttttgtccctgtttattttttcattatatccattctctttttactaatctgtggacttttccaaatcgttactggaaatctcacttacaccgcaacagctcatattggacagcccatatcaggcctgactttagtcttgctgctgcgtgcttttactagcggttctgcttctttgaccggagttgaagccatttcaaacgccgtccctttttttaaaaaaccaaaagcaaaaaatgcggttaaaacgttaaccatgatgtctgctattctcggagctatgtttatcggaatcacttttctcaactattggctcggtattatccccaatcataacgtaactatcttagcacaaatagctcagaaagttttcggccacagcttcatcggacaagtattcttttatcttttccaaattgcaacagcccttatcttagcagtcgctgctaatactggattttcagcttttccgattctttcttataatatggcaaagaacaaatacatgcctcatctttatttggaaaagggagctcgtctagggtattctaatggtattttaacattagctattggtgctatttgcttactctttatttttaacggttccactgaacgtctgataccgctttatactatcggtgtttttatcccctttgcattagcacagacaggaatgatcatttattggaaaaaccttaaagaaaaaaactttttcaaacaggctttggcaaatgtcgttggtgccatcatttgctatgctattattttgattctcttgatcttccgtctgcatgatatttggcctttcttcccgattattgctattttaattgccatgttccacaaaataaaaagccactacaatagtgtcgcagagcagctgcgtattactgataaaaataaagccgtctgctattctgacaataaagtccttgtactcgtcggcaatatgacacaggctactattggagctgttaattatgcacattccctcagtaaagatgttatcgctttgcatgtctcaacaacagaaacacttagcaaagatcatgaagttgaagaagagtttaaacagtttttcccaaatatcacctttgtcaatgtttactctgattaccgtgatatcattaagccaacagttaattatgttaatgcagccagtcagaaagcaaaagctcataacagcactctaaccgtactaataccacaattcgttccgcgtaagccttggcaaactctgctgcataatcaaatgaatctccgtctcaaatattatctcagatggaaccaagatatcatcatttccagctattccttccatcttaagaaataaaaaatctgtcaagtaactttactttacaagaatcttttgatatactattaaagttgacgcaagtcatattaacccaaaaaatgaatacgggctaaaaagccctttatatcttacggaggaaagaaaaaatggcagtacctgcacgtcgcacttcaaaagcgaaaaaaaacaaacgtcgcacacactataatttgacagctccaactgtgaaatttgacgaaactaccggggattactcacgttctcaccgcgtatccctcaaaggatactataaaggacgtaaaatcgccaaagctaacgctgcgaaataacagaagggagataccatgcgcgtaaatattacacttgaacataaagaatctggtgaacgcttgtaccttacttcaaaaaacaaacgcaacactccagaccgtcttcaattaaaaaaatactcaccaaaattgcgtaaacacgtgatttttactgaagttaaataaggattcaatacatttcagcacatgctgaagactttggttttatgcgatttttgaaagatgagctttcagtatcagtaagattgcaggaaaagtcgattgaagctctaccttttagaacaaaaattgaaattgaaattgaatcggataatcaaataaaaacgctctagtcaaccataaaaactagagcgtcttttattgattaaaaatcaaaaaattggcacaacacaatacttccacaataaatcataaatttaaataaaaattgatagagatttacttataaaaatccttcattaaattatttaagtcaatttttaaaacaatctgcctattttgagttaattgacattttctctcatggattagtttttctaatatcttttctcctgatgctccgccaacatgaaactttctttcggaaaaatctaaacataattttatattgggactcagttgacatcccagccattgctgcatagcattaatccctgcttgcgtcaaagagcagttgatagaagattcttgtttcattaatttatttgaataaactactcaaatattgtaacccctacttttcctgctaaatggcaaacatgtccgtgatttgccaagcttaattgcttgaggatacctagacagtttttcaatgactagtcttccttgctctttgatgggggcattattatttaattcataataaattcgtccgtaaaagttaaataagactatttcaggactagcttttaaaaaaacaatctcactttgagtgagaaaacgattagctgataaaactgagataatttgtgacgttgatatagtcattcaccactttttaatgactaaaacctcaatttttaaagaaatggtagaaatttggcataagttgtgtaatgagctgtgttggctcataaagaacgaattttttagcttttgttgttgttaataaattagcctcctttaaaatttgcagatgtctggatacactggaattactcatcactaaaatttgagccaaagattgtgttgtacttggtttatcaataacataattcataatttgtaaacgaacagggtcacttaaagctttaaaaatggtaatcaaattttccggtgtagcgttatagtaacttggctgctctgtaatatcataggtaacagcaattccttggttgaaagattcaacaaacagatgaggccaaataaaataacttggtaataacataatagaatcactatcctttaactgaatatctttatcaaacggcttaataatgactagtctgtcctttcgccaatgaatgcggtcaatttgcagatggttaaacatcgctttaaaaccactttcctttaaaaaggaagcttgatgctggatttctgttaaaagttttcgttgaatatctttgctttcccaagtttcatcaaatatttcttgtcggtaccaatcaacaaaagaaaaaagatgttgataaacactagaggcatccttcctcaagtcactaagtaactgattatccttattcaaagaaaaatccttccattctaatccccttgctaatgtcggaataaaggaattttctcgatcacttgtcactttttccagatgctcaattaactgagcagtagataactcatcaagaaatttctttagattttgtatctcttcttcaatcgttgtcgcatgataacgaaaattgcaaagtaaaataggagaaacaccaagttcataaaagagtcgaaagtaatgaagattttcataaaattccttagtaagtttattttgtatcctaatcacccagtcaatattagttccatgatgacgtggatttaataagacatgtaaacttctaaacagttcatttaaaggagaatatacaaattgtattctttgtgtcaacgtttcatctgttttcagagcataattgctaaattgaatggtaatcgccaaatgttatccctccaaacgattcgatatttttaggattgattgattattgatttccttcattgtatcataatctgagatgaaagaagggataaaaatgacgaaacgtttacaagatttttttataacagttatcgcaggtatgggaatgttattatccacccttgatacaggcattatcaatgttgcattatcctttttgaggggacaatttcaaaccacaactaacattgcctcttttacaataactggatatactttagcattagctatctctatcttacctttaggagtattaagcgataaatttggaaagttaaagatttcctacttaggacttgtactttttggactgagctccttattttgtggatttgctaatagtattggctggctcattactggccggattattcaaggaatgggagcggcggctttgcaagctacttcagcagctctgattaccactttagtttccgaagaccgcaaaaacagtgctattagtattttaggagtcatgattggtttagggcctgttctaggaccatccttgggaggcatactactttctttaaatctttggcgcttcattttctggattaatgttccctttgctcttattgtcatcatttgtaatcactatctccttgctaaagtctccgaacaaactagtgagtggacattagattctcttggaacagttctcaatgcttctatgttggtttgtcttctcttaggactatccttactcagtaagccccacctattaggtatcagtcttattttgatcatcattagtttcttgatcgggatttggttttaccgtcttgaatgcagcaaagagagtgctcttgtcaatgtcaaggggctgagcgagaatcctcgagtactttcttatctttttcaaacggtcgcttttggttttgcctctgcaatgatattcttacttccacccttcatttttgaacaattatatcatttaggagtggggcagacaggctttcttgtactaggagcacctgcaggtctggttcttttttcaagaatatctggtaaaatcaatgatggcagtaaaaataaatcatttagccatattggtttgggtatcattattttatccttaattttcctcctacttctcacgcctagctggccctatttattcttaactttaggattatttatttatggtattggcggaggatactttcagcctgctaatatggctagtattatgctagctagccctatgaaaatgcaaggtagcacaggagcattgcaacgaatggtacaaaacattgctatttcagctggttcagccattggatcaacttgcttaaacctttggtcaaataatctattattagctactcgaattggctggggaattacactcgttctagttattttcagtttaaaagaactaacaccatttaaaatgactaataaaacagaataaaaaggatttcagctgaatttatgctgaaatccttttttaaaaatattctttttcaatgatacttttatacgatctaaaagattatctaaaagtgtttctgaaatatcttcttttcactaatcattatttcaatcctttaaatctatccaatttgatttgcttaatctcaattcctttattctcaacaagaaactttttcatcgcctcaacatcattaggctgaccagccaaaagataggtggctttgttgccatatctatctattgctttcttcagcttttctttactttgggaaaggctattgcttctatcatagttcagtttaccgtttttttgagctatttgagacaattctttatcaaaaaccaagacacctttgtccaagtggctgagaacaatggaacgtttaccagcccactctttgacaataggctgcatggctgcaataccgacaaatgaaggaacttcgaaggcaatctttttttgattgttaaataaggtgccatacgatgacatacaataaaaaattaagaaactcatggaatattaaaaagagttagattttcccattaattgataacagtcaaactcttggcatatttaccgttttcaagtaaacactttattggcgatttataaatatataagttttaaggcgaaaaaacgaacagagtatgaaatctgctcgtttttgtgtgccatgggatttaccaactagttactattgataacttcaccgctgtctttgtcaaaagtatattctttaccatcgatagtgatggtttgtcctttaatttgacggccctttgtcttttcatcttggctaaagtagtagcgcttaccgtcgatagtttgccagcctgatacacgtttgccatcgcttccataataataccaaatattactgtagtcgtattttctgacaaatctattcgttacgaattgaccttgagtatcaaaaaagtaaccatctccatcaatctctgcaaaaccgtcatcaggcacagaaccaccaatttgactatactctgactttgcttttatgctgtgatcatccttaaagtaataagttttaccatcaataatctgccaaccagttagatctttgcggctgccgtccgctccaaaataataagttttagggaaacgagcctcaactgtactgatacgctcggcaggtgttgtgccaaaacgattcttagcaacttgtccactgtcttcatctaaataatagaccttgccatcacgctcagcaatgtcgcctttaacctgaataccactggaaggttcgaaatagtaatccataccatcgatcttttgccagtcggtcacgccgataccatcggctcccatatagaaccagtctgtcgtagagacgtatcctgcaaagttgtagaaataatactttgcattgacaaaacgattagtccaagcttcaccggtgtcaggatctaggaaagatttcttgccatacttctggctaattagattataattgccatctgtactaattagctttcctttgacttgaacaccattagtgtcaaaatagtattttttaccgccaatagttctccagccgatagcagcctttccatcttctccaagatagaaccagccttcatgtttaatattttcataatggaggggatctgcataactagaatagacaaaacgatccttccagagttcaccactatcaggatcaaagtagtaaatcttattgacttccaaaactgaaggtgaatcacttatgaaaacaggatgataaatgatttgatcccctgtctccacatgaatttctcctttgacctgactaccatcttggttgaaatagagctgctttccatcaattgtctgccaaccggttgccagctgtccatcggcctttttgtagtaccatttaccatctttttcaaagaagctattggttggagcagcgtcattattttctgcagcagtcgctggctcggttttagccgtttcctgctgggcagcattttctgatggagcattttgcactgactgagcttctccagaaacggctgtcgctttttctgctggatggtgctcttcagagtttgtttggtttgttactgcttcagtttggctggctctgcctccatcggatacttcagctgcctctgctgtttcagaacttttaacagcgttagcactgttattttctacagatgaatcagctgctggagcttctgtaattggttgttctgagctttcctgtacagtcgctgtcagtcttggcttactgtcagtaccgccggattgttcctcagcctgagtcaagtgagctcctgacaatatcgcagctagagctagactagtcacggcaatcgccacccactgctttttaaccttgtgcagtttaaaacgtgtcttttctttcatcattttacctccttaaaaaaatagtaatcaacatgacacttccactataacatttttaaaattaatgtaaatactaaactaaagatagtttttaatacctacaatctttcaacttatagccggattgccgcaaaagcatgatgcatttattcctaaattaataaactaacagtcttcttttacttctattacttgcaaattgtcaaaattgaagccattatcttttacaatgaaccctctctttttcaattcttttaatagagttatcataaaaaaaccatgagtgataaggatagcattttcgcccttataaattaaatcatcacaaaacttttctgccctttccttgctggctttgattccctcttgtttactagaattaaagagccactgcaatctacctagaatattccaaaagatcaagggcagctttatcttagaagaaaaggctgcttttaaaggaacttcattgagccttttatctatctgataagactgcaagggaaacagttgctgagctgtttgcttggttcggataagttcactggtatatatattagagacgggcaactctaaggaaccttgaaaagcaacaatatctgcttcatcatattttttacaggcctgattaaattcatccgaagtacactttttaggccaccgcatattaacttttgcatggcgaatgatatagaatttcatagcattatatccttacactttatttgcgatgtattgaaaacttatgaactcaaaccgattatgtatcaatttaagtcttttttcaaagttaacttctcttggtaaaaatgtatcttttcaattaatttttctctgttgtccaataaatcagcaatattattatctaaaacctgcaaatgatgctctaaaaggattagtctctccaaataagtactttcccctttttctcgaagatctgaataatgttttatttcttttatgggcataccaacagctttcaagcgtaagatgaagagcagccattgataatcactttcattgtaatacctcctattgctgccatctctttgcggtctcaataagccttcattttcatagtacctcagagtatgaacgctaagacgcgttaattttgaaaattttccaatggaataatgcataatttctcctttaagcttgacctctagttcgctctagatgttatagtcattatatcttaaaaggaggtatttgaacatatgatgtattcaaaaaattacgtttgtattactggagcgagttctggtattggcttagaaactgcaaaagcatttgcaagtttagaaaacaatcttattctagtcgccagacgtcaggagcgattagagaaactcaaagaggagcttcttctcagtttcccaaagctggatattgttgtcaaatcagtcgacctttctatttccgagaatgcctttaaactttatcaggaattaaaatcgtatcagatcttaacttggattaataatgctggttttggtaattatgatagtgtggatcatcaaaaccttgataaaatcactaaaatgcttcatctcaatatcgagtccttgactattttatccagtctttatgtaaaggactataaaaatgtagaaggtactcagttgattaatctttcttctagaggcggttatatgttagtcaaaaatgctgtaacttactgtgccagtaaattctatgtcagtgccttcacagaaggactggctctggaattggcagccaatcactgtcctttaaaagccaaagttttggctcctgctgcaacaaaaagcgaatttggacaggttgctgctgatacagatagttatgattatgacaagcattttaccacctatcatactagtaaagaaatggctgattttctaatcgaattatactatagtgataaaattgttggattagtagacatcaatgatttcgactttaaattgagtgagccgctgtttaaacactgattcttttttcagcaactgcatttgatgcggacagtctaaaataagcctacacttaccttgcttgacagtgtctatgaaaacaaaaattaccctcattaggatccgagataacatcttagtgaggctttattcttgataatttactgttgttttatcaaagcaatctgttcaaggaaaagtccttttaagtctgccgtaagaaaaagtcggacagccttttcctgattatacgttattgacttcaccttgcccactatagtacttctgcgactcattgcattgaatacaataattgcctttttgtacactttctaggtgtctgttgtttgataagattacgattgtcttatttttgtaatataaacttgatatactattaagcaatagagaattttctaagttttatatattatttagattaaaatagacttgaatgcttgaggaggaaagtatggataaagatccagttattgaatttaaagaggttaacaaaatttatggagataatgttgctgttaagcatatcaatttaaaaattatggcaggtgaatttgtctgcttgattggtaccagcggatccggtaaaacaacaattctacgcatgattaaccgtatgttaaaaccaagcaatgggaaaatttttatcaaaggggaagaaatttctgatctcaaccctgttcaactcagacgcaagattggttatgttattcaaaatatcggtctcatgccacatatgacaatttatgagaatattactctggttccgaaattattaaaatggtcagaagataagaaaaaagctaaagccaaagaacttataaagcttgttgaattgcctgaagatttcttggatcgctacccttacgaattgtcaggcgggcaacaacagcgtattggtgttgtcagagctctagctgctgatcaagacattattttgatggatgaaccttttggtgctttggatcctatcacccgcgaagggcttcaagatttggtgaaatctttacaagaaaaaacaggaaaaactattgtcttggtcactcatgatatggacgaagccctaaagctagcaaccaagattgtcgttatggataaaggtcatatggttcaacaagccaatccgaccgaattgttacgccaccccgcaaccgcatttgttaaaaagatgattggtgaagaccgactcattcaagcacgcgctgatgtaacgccggttaaaaacatcatgctaaaagaccccgtttccattacacctgataaatctctcaatgatgctatctcactcatgcgtcaaaaacgtgttgactctcttttagttacagataaggataataaactactcggcatgattgatgttgaatccttaaataataactacaaacaaaaccttgttgttgccgatatcttaaataaaatcagtttctacttggaagaagatcaactgctgcgcgacacagcccatcgtatcttaaaacgcggacttaaatatgtaccggttattgataaagaatggcatttaaagggaatcgtgacgcgatcatctctggtagatatgctttatgatattatttggggcaatcaagatacggaggaaacattatgagcgaatttctagcacaatatggtggtgagctgctcataaaaacatgggagcaaatttatatctccgccattgcactttgtcttggaatcattgttgctgttccaataggagtggctttgacacgatttcctaaattagcaaaaattttcattggtatcgccagtatcttgcagacaattcccagtttggctctgttagctatcatgattcccttttttggcatcggaagaaccccagccattattgctttgtttgtttattctttattgccaatcatgagaaatacctatatcggaatgaacaatgtggatcctatcttaaaagacagtgccaagggaatgggaatgaaaccaatccaatctatttttcaagttgagcttcctttggcagtccctgtcataatgacagggattagattatcagctatctatgtcattgcttgggcaactttagcctcttatattggagcaggcgggcttggagacttgattttcagcggcttaagtctgttccaaccgtctcttattatcggtggaacaattccagttatcctcctttctctcatcgttgactatcttctaggacgccttgaaaattatttaacaccacgacaaaagaggagtttataagatgaaaaaaataacttattttttaatcattactttgatgattcctatacttatgctcacaagttgtcattctaataataaggccaaaactaacactaatacttcgggcaacattaaaattgcggccatgagtacaacagaatccagtattatggccaatatgatcagtgaattgatcaatcacgaattaggttataaaacaaccttggtatctaaccttggttctacaaatgttgtgcatcaagctttgatacgaaatgatgcagacattgcagctactcgttatacaggaactgatttaacaggcacactcaatttatctgctgaaaaggatcacactaaagccgctaaaattgtcaaaaaggcatttgccaaacgctttgaccaaacttggttcccaagttatggcttcgctgatacctatgctttcatggtcaccagcaagtttgctcaacaaaatcatctcaagactttttccgatttacaaaagatatcaacaacagctaaagccggtgttgatagcacttggatgaaacgtgtcggtgatggttataaagatttcagtcgtgcttatggtttttcatttaaacatatttaccccatgcagattggccttgtctatgatgctgttgaaaataataaaatgcaggtcgttttaggctattctacagatggtcgtattcagagttacgatcttacgatactggaagataataaacatttcttccctccttatgatgcctcaatggttgttaataatcgtatcttaagaaaatatccaaaactaaagaccttattacaccgtttagatggtaagattgaccttaaaaccatgcaaaaactgaactatcaagtcgatgaccaattacttgaaccatcagtagttgctcatcaatttctgaaaaaacatgattatttccgaaagggtgataactaatgagtcatatgagtatggcacagcaattaatttattatttcaaccataatagtacctatgtcttggcacaatttttacggcatttcttaatatccatttatggtgtactccttgctgctcttgttggtattccaatgggcatactaattgctaaaagagggaaactcaaaggggttgtcatgggagctgctaatgtcattcaaacgattccctctctagccatgatttctattatcatgctaggacttggcttaggcactaaaacagtcattgcaacagtattcttatattctttacttcctattatcggtaatacctataccggtattaaaaatgttgatggtgatctcgttgatgctgctaaaggaatgggaatgactaatagacagcaattattgatggttgagctgcctttatctttgtcagttattatggccggcattcgcaacgctctggtcgttgctgtaggaataacagccattggcgcctttgttggtggcggtggtctcggagatatcattatccgtggtaccaatgccactaacggcggtgctattattttggctggttctataccaactgcttttatggctgttgtctctgatttgattcttggcattattcaacgctatctagaacccaaaggtatatcaactaaccaataaatggaatactaaaaaaccttctgtctcttaaaaggcagaagatttttgcaggcaatttttaaaaactaatcattaaatcttattaagatttccaagtctctttgtccgttaagaggctttttttagctatctttgaaacatgttgatttcccctaacataaaaacaaagcagcgcatctttccactcatcagtacaagtcacaccaatgcgagaacgttcttcaatacgctggggtgataaatcctcttgtaaactcagcctagagtcttgtaaagaatcaccattaaagcttttatcaatgcccgcaaattttgtcagtttaccaggtccattggctaataaatgaccgtcagctgtttcaagtgctcgaatcaaaacggcttcagctacattttgaggcttagtcactaaattcaacatttgatgtccataaatttgataaacataccaatgccccgccgctaaatacatggcttcatttttaggagttctgcgatcatttgcgctatgacaagcactgtctttgctccctaaataagcttctgtttcaacaattctccctaagggcttatcatccagacacaattgcattcctaataaagccttggctgttgcaatggtatctgtttccataacttgtttaaatttttttgatagcataatctttattataacatgaagatggttactttaagactttttcaaaagcttttgacgatttcgtcggacaaaattctatgatatcatagtttgcaatctcattgatcttaaaaggatcttcactaataattctctcaatttctgccaaatcagcagcttttgctaagatgataccacctgttcgaggattttttctgcccgaagcgatgaaataaccagaagcataatatgtatccaaaaattgaatatgagcttcaaggtgtttttcaacttctgttagattcttttgataggtaagattgatgataaacataattttctccttttaaaaataaaaattgcttgaaaaaattgagactgaaaaacttgacttccacaacattcctgcaactttattcaagcgattatatatagtataatactaacaaaatgacttgtatagtaggcacatttttgtaactagtcaattaatattttagatgatttagcaacaataagctgacaaaggagaaaaatatgaaaaatcagatctttaaacaaaatagagatgattgtctagtctcatgggcgtttcttgctggtattttgttatatatggtgattcggtttggctttttatatttcagcttacaactaaagttgacaaactccttacaccaaaccataaatcaacatagaagtttactgatgaccatggacgaattactcatgctctcaactatcctttttggatgcactttttatagtatacgcaaacgatattttcaaaataaaaaaatactaacaggacttctaatgacaaattttacactattattaatatcatggctattaatagtagtagaaactggcagacttatctatcctatcaatggtttatctgccgtcataggtgacaaccttcagacaactttagccgaaatttatgcaacttggcatttatgtgacatcttactaggactattcataatttcatggtccggattattaccccatcctttttggaaatacagcggagtaattattggactgatgcaaatactctgtacttattttggacaaggtataaagccaatacccttgtcaatggcaatcatcttatcaacgatctggttgttaaaaagatggcaacatttttaacaacaatcaataattggtatacttttcaataaagccaaaaaagagaaaacattgaacagtaataaaggttagaattgtaaaatgtcacaggttatggaggttgttggtgggaagtggcgcttaaatgttctctgggttattaacaaataccagtccattcgctttaaccaattaaaaagggaagttaacggaatcactaccattatgttaacacgttccttagatattttaatcacaaacgaactagttgaaaaagtagattttcaaaccctaccactacatgtcaaatatcaactctcaagtaaaggtaaaagcctcatgccccttttaaaacaaattaatcagtggggaaagctttatttataggttaaaccttcctttagaattcaaacttctcaaagataagttgaaaaatttaaagcaatttcagcaattttatctttctcatctaaatcggcttcattgcctaaagacctcggatgccatctttcttctgatagatgatctgcagcataaaagaactgacagacagcaatttctctaaattgtccccaagcagcgactgccgaacattccatatcaaccgctagacaaccttcttgtttacgagctttcatcttagtaatcgtttcacgataaatgccatcagttgtccaaactttcccttttgaaaaagagatattttcagcttgtaaataggtcaaaaattttgctaaagttctgtcattaactgagatttcattttgtgctggggaataatgaaaactggttccttcatcgcgtacagcaattgtcggaacaataatagacgtttccttaacctgttcctccaaaataccacatgttccaaaaagaatcagcttcttcattcccatggcaactaggtcttccaaaacggcaacacagccagcagcaccaacataagcattaaaaacggccaacttacgaccatgataatcaagttcataaataggaatatcaagattagccacagaagtttttgtcaataagcgatatttataacgttttaacatgtgtttgaaggttgctctagcaaagcaagatactactatttcagggaaatccggaatggctgcgactaaatcttctggattaataatcgctttttttgcatcatcaaagttacttaaaatcattgtttctccattctagctttttaatatcctatcataaaatagccttaataactagctataatggcataaatagtgttaaagtagttctttaacaaagcaagcaaaggcggatgaaataagtttaatccttgaaatcggtttcaaaaatgctataattaatttaactgaaaaatggaggaaaaattatggcctataagacaacttatccctatactaatgaagttttgaaggaatttgctaataatagcgatgccgatttagaaaaagcattggttactggacatgcgctttataaaaaatggcgtgctgaaggaggcttagaggagcgtaaagctcaattgcataaagttgcggatatccttcgtcgcgatgtggataaatacgccgaagtcatgaccaaggacatgggaaaactctttacagaagctaaaggtgaggttgaactgtgtgcagaaatcgctgactattttgctgataaggctgaagaatttttagaaccaaaagcatttgaacctattcatggtgatgcctattacattaagcaagcagttggtgtgctctttatggtcgaaccatggaacttcccattctatcaaattatgcgtgtttttgctcctaattttatgattggcaacccaacggttttgaaacacgcatctatctgtcctgcttctgctcaggcttttgagaatttggttaaagaagcaggcgctcctgaagggtcatttaagaatcttttccttacttatgatcaagttaacaaggctattgctgatcctcgtattcaaggggtggccttaaccggttctgaacgtggtggtgcttctattgctgctgaagcgggagcaaatcttaagaaatctgctcttgaactcggcggtaatgatgcttttctcattttggaagatgctgactttgaactcttaaaagatactattttctttgcacgcctttacaatgcaggtcaagtctgtacatcatccaaacgtttcattgttgttggtgaagaaaactacaagaaatttcttgatatggttgttgaaaccttcaaaacagccaagtggggtgacccgatggatcctgaaacaacgcttgcgcccttgtcatcagccgaagctaaggaagaagttcttggtcaaatcaagttagctgctgacaacggagcacgtgtggtttacggtaataaaccaattgaccatccaggaaactttgtctttccaaccgttttgaccgatattaccaaggaaaatccaatctacaatcaagaaatttttggtccagtagcttccatttacaaagttgatacagaagaagaagctattgccttagccaatgattctagttacggacttggtggtacagttttctctaaagaccttgaacacgcaaaagctgttgctgctaaaatcgaaacaggaatgacctttatcaattccggttggtcttcctatccagaagttccatttggcggtattaaaaattcaggttatggtcgtgagctcagcaatctcggatttgatgcctttgtcaatgaacatttagttttcattcccaaacaataaactaaccaaaaagttttaagctgttaatctcttagattcaatcagagtctaggagattttgctatcattgatagatatttcccattatgattagaaattgatagaattttacaataattataatgatgacaaggattatttgtgctataatgatggtgtgtaaaatttctacattgaatgactatatgatgtgatgaaaggaagcggtcaaatgactgacaaaaaaactcttaaagacttaagaaatcgtagttctgtttacgattcaatggttaaatcacctaatcgtgctatgttgcgtgcaactggtatgcaagatgaagactttgaaaaacctatcgtcggtgtcatttcaacttgggctgaaaacacaccttgtaatatccacttacatgactttggtaaactagccaaagtcggtgttaaggaagctggtgcttggccagttcagttcggaacaatcacggtttctgatggaatcgccatgggaacccaaggaatgcgtttctccttgacatctcgtgatattattgcagattctattgaagcagccatgggaggtcataatgcggatgcttttgtagccattggcggttgtgataaaaacatgcccggttctgttatcgctatggctaacatggatatcccagccatttttgcttacggcggaacaattgcacctggtaatttagacggcaaagatatcgatttagtctctgtctttgaaggtgtcggccattggaaccacggcgatatgaccaaagaagaagttaaagctttggaatgtaatgcttgtcccggtcctggaggctgcggtggtatgtatactgctaacacaatggcgacagctattgaagttttgggacttagccttccgggttcatcttctcacccggctgaatccgcagaaaagaaagcagatattgaagaagctggtcgcgctgttgtcaaaatgctcgaaatgggcttaaaaccttctgacattttaacgcgtgaagcttttgaagatgctattactgtaactatggctctgggaggttcaaccaactcaacccttcacctcttagctattgcccatgctgctaatgtggaattgacacttgatgatttcaatactttccaagaaaaagttcctcatttggctgatttgaaaccttctggtcaatatgtattccaagacctttacaaggtcggaggggtaccagcagttatgaaatatctccttaaaaatggcttccttcatggtgaccgtatcacttgtactggcaaaacagtcgctgaaaatttgaaggcttttgatgatttaacacctggtcaaaaggttattatgccgcttgaaaatcctaaacgtgaagatggtccgctcattattctccatggtaacttggctccagacggtgccgttgccaaagtttctggtgtaaaagtgcgtcgtcatgtcggtcctgctaaggtctttaattctgaagaagaagccattgaagctgtcttgaatgatgatattgttgatggtgatgttgttgtcgtacgttttgtaggaccaaagggcggtcctggtatgcctgaaatgctttccctttcatcaatgattgttggtaaagggcaaggtgaaaaagttgcccttctgacagatggccgcttctcaggtggtacttatggtcttgtcgtgggtcatatcgctcctgaagcacaagatggcggtccaatcgcctacctgcaaacaggagacatagtcactattgaccaagacactaaggaattacactttgatatctccgatgaagagttaaaacatcgtcaagagaccattgaattgccaccgctctattcacgcggtatccttggtaaatatgctcacatcgtttcgtctgcttctaggggagccgtaacagacttttggaagcctgaagaaactggcaaaaaatgaaatcaaacattaaaaagaccgcttgaatcagtatttgaattaaagaaaagattaaacactcttttctttaatctttttctttcgcttgataaaataaaaactctcaaaaaaacagttattgcatattgcagttttttgagagtttttatttattatttagggctgattcccaatgctattctgccaaatcgactaatccgtgtcatcttccaagctggtgaccaaacaacctcaacaccaaccttattgatcccttctatctctgacagggaatcaataatttccgcaggcagagtatcaacacaaccgcaattgacttcagtaaatgtaataactaacttgcagaagccttcttcatctaaatcaatttcataaatcaaaccaagattgtaaatatccaattcaatttctggatcataaattttttcaagtttttcaatcagttggtcgccaatcgctgcagctcggtcatttattttaatatcatctcgcattgtctgctcctttactaaagtcatttgctatattttcccataaatagacatttttttcaatgcctaatactcgatagttatcatttttgtaaaaaaggtttcttcttcgttcaagaattacgagagaggtaaataggttttatgatagaataaagatgataaataagtaaaaaaggagctttatagagatgaaaattttcagaaaccctccccttgttatgtcaggactaactttgggattgtttgctctaggtaatttattaaaactatatcatccttctctacggcatttactaagtattatagcgctcttactctacctgtttttaatactcagtattttaaaaaatttatctcaagctttagaacaaataaagcatcctttaatcgcttctatttttccgaccttttttatgtcaggtatgctgttggcaggctatatccaaacttttccttttttagaagattgggttactcttattagcctgacgatttggtggctcgcttttctaggcaacgcaggactgattgcttattttacaattaagttcgtcatcccttttcattgggaacatgtttttccatcttggtcagttttatacgttggaattgcagtagcaaccttaacagcacccatcagtggacaatatattttgggtcaaatcatcttttggacttgtctccttttaactttgctgattttacctttgatgactattaaagcctattgtattggtttacctgagacagcaaaaccgaatatttgcacattttgtgctcctttgtctcttttattggctggctatttaaagacattttctcccgaacaaagccctaatactaattttgtttggcttttgcttttagcctcccaattactttacttttttgttgtgcttcagcttcctgtacttctcaaaagagagtttaatcctggcttttcagcttttacctttccctttgctatctctgctactgctcttcattcagcaggttcttatctgcatttacaacagcctctatttcagttattagttaaactagaggaattactagctagcatattagtcttattcattttatactcttatcttcgatttttaagtaaacaagaagaccttccttcaaattaaaatgatatttcatttaaaatctgaaaaatctcccaaactcaaaccaaacataaacttttttgtgattttttttcttagtgttaaaaactttagttcgaaacgaaagaaaaagtcctatcatctctgcagtagatattgcctactatggagatgaaggactccaataaaaacaaaagtaacagaaagtaatttttaggctactttgatagacctaatcctccttcgagcgattagcaatcctaaagcagcaaaagtaaggaaaaataaactcagcgctagtagttgattaccaattataccagccatagaaatggtttctcgtaaaccagaaaccgaataactcattggtaaataaggattgacaacttggaaaaacttacctgtaacagctaagggataggttcctgcactggaacctaattgtagtaaaagtaaaattaaggcagcaaaagagccaaatttatcatgccaagttaccaaagttgtcactaagaccataaaagtgatactggtaagaataattaatcctaaagtttttagttcaaaattagctgataaaccaataatatgaacaccaaaatagagaataatagctccagtaacagcaatcaagccattgactgctaacttttgatctatccattctcgtaaggttttagcctgcttaccagaaagagctgctctaaagatagtattggttgaaattgccattaccattaaagctgctgacatcatataaggagccattccaacaccatttgttttgacattatctttatctgtatgcttgatagtgacaggacttgacaaagtcttagcattatcattgtcaactgctactaatgataatttatttttagcagttgacaatgctttcgacagttctccactaccacttgacaaagttgtcaagcctgccgttaaactttctccacctgcagccaatttgccagctcctgtctctatttgattagcaccatttgctaactgtgcagtccctttcgttaattgtccagagttgctatttaattgattggcaccatttaccaattgacttgtaccatctgttatctggttatttttagcggccaaagtattagctcctgcattaagaatatcaactgcattagtgtattggcctactcctgtcatcaaggaattggcgcctgttgaaaaagtagagcctaattgagccgtaccattagcaagggctgtgctgacagggactacttgcgaatcaagagctgtttttgcttgtgtcaaaccacttgacaaagttgtcaaggaagttgctgcactaggtaatacagaattagctgtatttttaatttgagtcaagctggctgatgggcttgttggtgtattagcagttgttgtctgtacagtagataaggcactttgaatactttggacattgtttaggatagcttgggcttgtgacactgcgtttgcatcagcacctgtagttgttgttgaactaccagtgttggccaaagctgcagcgatctctgattgatcctcagcggataatctttgataagcacctgtagcttgaaccgcagccaatgcattagactgattagttgttgtttgctggtttgtacttgtatttcctgaattaacaattgcttgagctgctgttgtaatggcagatagataagtactaagatcaggactgtttgcagtcgttgctgtcccattatcactgtaattttgaatactttgattcaaagttcccaactgattaatcaatgagctaaactgttgaacttgttcttcagaaagacctgttgctgttgacagcttaataagtccttgattcaactgactactagcattaaccaattgttgaatagaagtagaaccactccctaattgcgcaacacctcctagaagcttctgagattgattgctcagttggctgctgccatttgctaactgaccaactccatttgtataagctgtcaaaccattgtttaaattatttaaacctgcagaaagctgaccgacacctcccgtataagctgttaagcccgaatataaggtattagtcccttgagcaaatgtttgacttgaatttgaaagtaaattcagattatcagtcatcacttgactgccattttctaactgttttgaaccaaccgctattttttgactagcattagccgcactgccaagacctgtttttagggttgacatactcttaaaaagtgatttggtgtaagaacttgtaatgtttttcgatacagactcttttaaagtcttagcagcagtttcactcattttggaggcaacaaaactatgtcctttagacgtttggtaaggaatcgtgagttttttaggctcatctgttaaaacactagctgcattttgagaaagatcttctggtaaagtgattatcatatagtaatcacctttttcaagtcccttttgagctttttcgctatcaacaaaatgataatccaaacttttattatgaaccatattatcagtcatgtccttaccgatagtcatcttctttccttcataagttgccgttttatctttattaacaactgcaacaggtaaatcagatactttgccataaggatcccacatagaactcaaaaaaataatattatatagggcagggacaagggctactcctaccatcgtaatccaaagcataggcttttttaaaaccgcttttaattccgttaacattctttctccttttttatacattctgtctaaatatttgatataataaattatactagttattatctatttgacaagattaaaaaactatttttagacactgtgtataattttgtgcaaaaggagactttaagatgaaaaacacaaaaaaagaaaaaacaaagcaagctcttgaaaaagccatggcacatttattagagagagaaaattttaatgatatcacaacgactgaactagcaaaagcagctcatatcagtcgcagtggtttttatactcattataaagataaatatgagatgatcgatatctatcaacaaacactttttagtaaattagaatatatttttgataagaattcagctaaccaagaaggcgctattttagaagtatttgaattccttaaccgagagcccttatttgctgctttactttcagaaaatggcactaaagaaattcaagaatttcttaaaaataaatttaaaatcctaattacgcaagatttacaatatggtctttctattactattcaaaatagctttcacaataaaaaactgacagatgtcgaaaaagaatatggaactatgtatgttactaacgctttatttggtgtctgtcaaatgtggattgctcgaggaaagatagaaagtcctaggcaaatgaccaatttcattattaaaatgatgcattaaaaaaagccatttgaaatggctttttgaataaaataaatgaattaaagcattttgttataaaattcaacgacaagggcttcgttaatttctgggttgatttcatcacgttctggaagacgtgtcaatgaaccttcaagtttgtcagcatcaaaggatacgaatgctggacgtcctactacagattcaacagcttcaagaatagctggtactttagctgatttttcacgaactgaaatcacttgaccaacttcaacgcggtatgatggaatatcaacacgtttaccatcaacaagaatatgaccgtgatttacaaattgacgagcttgacgacgagtcgttgctaaaccaagacggtaaacaacattgtcaagacggcgttcaagaagaagcataaagttgtaaccaaggattccacctttaattttagttgcttgaacaaagagattacggaattgtttttcaccaagtccatatgagaaacgaagcttttgtttctcagctaattgcaaaccatattctgaaagtttgctgcggttgtttggtccatgttgacctggcacgtagttacgacgtgctaattctttacctgtgcctgtaagagacaagccaaggcgacgtgattttttccatgatggtcctgtataacgtgacatatcatgtcctcctataaaaaataatataattgaggaaatagtcacttgaagaatcctgattcgtgcagatgcccttcgcctaaacagctaaggttactttatcctaagacacctgttgacgagctccatactctcctgctgctatttcacacaaaaagtattgtaacatagaaaaaaggctttgtaaagccaaacttttcataggaatgtatctcagttttttaagaacgagatatactgtgccatacattatttcttgttcattttcaagggcagacattttatttcatttattgaaactaatcaaaataacgtattaatgttttctcagtcagaatatctgaataagtgtatgattctacataagtattatcaatctcacccggaacagaagctttatccttgtattctacaataaataaagatgaatagacttcaattaaacgaccaattttatttttttcacgcttacgcccattttcaagggtcaattcaacttcttgaccttcatgagccttaatatcttcttttatttttttcattttggcaacatctgcaaatgcgtcactcattgtttcttttctcctatctctcttcaaattgggcaatactagaaaatttattatattctttttggaacattaattttactgttcctcgagcaccagcacgatttttttccaagataacctctattgtattatctaccaattgttcttgcccttcatctttatctcctctatcgtaataatcatcacgataaagaaaggctacaatatcagcatcttgttctatagaccccgactcacggatatcagaaagaacaggtcttttatcttgacgctgctcaacaccacgagatagctgactaagagcaatgacaggaactccaagttccttagcaagaatttttaactgacgcgaaatatcagaaacttcttgttggcgattttcaggtcgtgtgcctgtgattaattgcaagtagtcaatgacaattaatcctaatcctttctctagttcctgatctaattttcgagcacgtgccctaatctctgtaaccttgattcccggagtgtcatcaatataaattggtgcatcagctagagtcccttgcgcaagcgttatattttgccaatcctgttcggttaactgacctgttcgtaaattatgggcatcaaccattccttctgaagccagcatacgatcaactagactttcagctcccatttctagagaaaaaatagcaacaggacgattcattttagtgccaacattttgggcaatattaagaacaaaagccgtcttacctaccgctggcctagcagctaaaataataagttgatctgggtgtaaacctgttgtaatcttatcaagatcccgaaaaccagtagccagtcctgtaacatctgttatttgctgagaacgaacttctaaattttcataattgacagcaagaacatctgaaattttacgaaatccactacgattactgcgctcattaacatcaatcagggctttttccgcacctgaaataatatcttcagagtttattgcgccttcgtaagcttgattaacagcttctgtcaagcgtgaaataatccgccgaagcatagccttttcagctacaattttagcataatactcagcattagcactggttggcacgctattaaccaattcaaccagataggaaattccaccaatattctgaagatctccttgattatcaagaatagcacgaactgttgttgcatcaatggcatcgttttgatcactaagactaatcatcgctttaaaaataacacgatgagcatatttataaaaatcttcaggatcaatatattcccgaacagcaatcaatttctctggtgatataaaaacagaacctaaaacagattgttccgcaattaaatcttgaggctgtactcgtaattctgaggtctctggcacaatttcacctcctaactcatttaagcttctttaatttgaagtttaatgatgccatcaatatctttgtgaagttttacaggaatttcaattaaaccaattgttcgaatcggatgatctaatttaatataacgtttatccagtttgatcccaaattgtttgttcaattcttcagaaatttttttacttgtaatagaaccaaaagtacgaccatctggaccaaccttttcactgaattgaacaagcgttgattcttgttcaagtttaactttaactgctttagcctcagctaaaagttcggcttgagctttttcttcagatttttgctttccctttaactcattaatagcttgttttgtggcttccttagccaaatttttcttgattaaaaaattctgagcataacctgtagaaacttcttttacttcccctctcttacctttacctttgacatctgctaaaaaaataactttcatcttaagcttcctcgtttcctgtaaattcttctttgatcttttctaataagagtttgcgggcttctttaacacttgtaccttttaattgacaggctgctaagttgaagtggccgccgcctcccatttcttccataatccgttgaacattaattttattgcgactccgtgcagatatacaaactgttctttcatcatttctagtaataacaaaggtagcctcaatcccagccatatttaacatagtatcagcagccttgctagcaataacattggaataactgatatcatctgctcctgtagcaacaacaacatttggtaaaatacgatcgccacgtaaaataagttcattaattaaacggtattcatcaaaatcaagagctgaaatattttgaatttcaacattatcactgccaagtgtacgtaaatagctggctacatcaaaggttcggcttgttacacgagtcgagaaactttttgtatcaagcataatcccagccataacaatactagcttgaattttattgagatggtatttcccattttggaactgtaagagctctgttactaattcactagcactgcttgctccactctcaataaaggttaaaatagcattttctggaaaatcatcatctcttctgtggtgatcaatcacaataacttctgtaaacttattgtaaagctctcttgacaacgttagctgcaatttagaatgatccaccataacaagaagagaattatcacttacttgttctatagactctttgactgttaaaagttgagtatgcccatcttcctttaaacgattgacagctcttgctacatcatgactcatactatcttcatcatagacagcataagcagcatgttcaatgatattgtttgcgaaagcctgcatcccaactgaagctcccaaagcgtccatatcaagatttttatgtcctacaacaaagacactatctactgttttaattttatcagaaatagcagtcatcatagcgcgtgtcctagtacgtgaacgcttaatagttgaaactgttcctccaccaaaataaagcagtttcttatgttcgtcattttcacggataacagcttggtcgccaccacggacaagagcaatattcaaattcttcaaagcgatttgtccaatttgactatgatttgcattgccataagaaatccccatacttaaagttaaaggaaggtggcgctcttgagcctcttttctaaattgttctaacacctcaaatttatcttgaatgagttgatctaagacactataatctgtaaagaaataaaaacgatccatattaacacggcgatagaaaatttccctactttgagcaaattcagaaataaaattagcaataaaaccattaatttgtgaaacatctgcatctgctaaagactcaatcgtatcatcataattatcaatagatataataccaatgacaggctgtaaatctaatccttgcctttgattctcactttctctggataaattgaaaaagtaaaaaataccattgtctaaatctatatcaacagaatatttattctccccaacttccatcgtttgatcaacagaaccttcttttctatttttaatgacactgctgataaattcaccatcaaattcaccatcttctttcgtgaaaattaactctgcaaaaggattaaaccactcaattttatctgtttcaggatcaaattgaataacacctaccggcatctgatcaagcatagtaatcagcttaccttcagtttggctatttaagagttcaatctgctctaattcagaaatttcataaatattcttttgatagtaaagcagtatgattacagctacacaagtcaaaaaaataataaacattaacagtggtgaatctggaaaaacacgcgcactaatagccaaaattccaaacaaaatcattccaatcatgattaaatggctagtggcaaaacgaaatcttttcattatctaaacctcttaagccctaattatatcataaaactcttataaaatatagaaggaacaaaggggaattcttttcattttatcttgtacgacttctattctttccttcaagatagaccataagaattgatatatcagctggattcacaccagaaatacggctagcttgaccaatagtttctgggttaattttcttaaatttctgacgtgcttcggtcgcaatagaatcaatggcatcccaatcgatattcttaggaattcgtttttcttccattcgcttcatttttgcgacttgatctagggctttattaatgtatccctcgtatttgatttcagtttctagaagttcaatgaccttctcatctaagctttccgccgcaggcccaacaaaacttgttgcaatggcatagttgatttctggtcgacgcataaattcttttgctgtcaaagcatctgtcaagggcttaaagccaagttcttcaatacgtttatttatttcagcaactggttttaattttatacttgacaaccttgtcaactcattgtcaaattgatttttacggatttggaagcgcatatagcgttcttcattcactagaccaacctgatgaccaatttctgtcaagcgtaaatctgcattgtcatgacgtaagatcaaacgatactccgcacgcgatgttagtaaacgataaggttcaagggttcctttcgtgaccaagtcatcaatcataactccaatataagcatcgctacgtttgagaatcaattctggttttccttgaatcttaagggcagcattgataccagcgacaattccttgaccagcggcttcttcataaccagacgtcccatttgtttgaccagccgtaaatagtcctgagatttttttggtttccagagtcgcccgcaattgatgaggaaggacaatatcatattcaatggcatagccagtccgcatcatttcagcattctccagtcctttaatcgaatgaaccacatctttttgaacatcttctggcaaactcgttgacagaccttgaatatagacttcttctgtttcacgtccttcaggctctaaaaaaagctgatgacgatctttgtcagcaaaacggacaatcttatcctcaatagaaggacaataacgtggtcctacacccttgacaatacctgaaaacataggtgctctgtaaagatttttattaataatatcatgactactttgattggtataggtcagccaacaagggatctgatctttaaggtaatcttcatctttggacataaacgagaagtgatttgctttcttatctccgggctgaatttcagtttcatcataatgaatagaattagccttaactcgtggcggtgtccccgttttaaagcgcccaatctccagacctaaatctctcaaattatctgctaaagttactgaagcgagactattattaggcccagatgaatattttaattcgcctaaaatgatctcaccgcgcaaagccgtaccagttgtcacaatgacagcctgagcgctgtatttctgattcgtcgctgtcctaacaccaataactttaccatcttcaaccaaaatttcatcaatcatagattgacgtaaggttaagttttcctgttgttcaaccgtatgtttcatgttgcgagcataaagtgccttatcagcctgtgcacgtaaagcacgtactgctggacccttacccgtattgagcattcgcatttgaatataggacttatcaatattctttcccatctcaccgccaagagcatcaatctcacgaacgacaatccccttagcagaaccaccaattgaaggattacaaggcataaaagccaacatttccaaattaatagttgccagtaaagtcttacagcccatacgactagtagcaagactggcttccacaccagcatgaccagcgccgatgacaataacatcatagttttcagtaaattcgtgtgtcatttctatctcccaaacacaaaaatagccaaaaccctcgaaaattgtatgtcaaaaagacctacaattctcatgagctttgaccatcatgattattatcatatttattttatcaaattcatcttaaaagtcaattcctaaaagattgtaaccgttctaatagcagagagttgctcccgtgctcaaaaagataagctgtcaaatctttcctttttaaaatcttaaaaagcaatgctttgtcaagttgatcaataatttctaaaaatgattttttagttatatcatttaaagtaagtagaagttgtgcttcttcacgttttcgctcagctacttctggtggataaccaataccgaattcaccatgaaataactcatttaaggcatattgcaaattcaactccccagcccaaccaaaatttaaacccagagaaagtgaagcaacatttccattattgatacgaccaaagagaaaggcatcctgtggtgtctgaataaaaccagcttgtaaaccaggcaaactattacatgccatcatcattccttgaccagacgagcaaccagaaaccataaaatcaatagccccagtttcaataagtagactaatcatgatagccacttcaacataggaataattttcagtttcttgcggaaagactccaaaattgacaatttcatgctgatttccagctgcctgtttgaccgcctcaaaaagaagttgattgaggtctgtccttgtactcgcttgaataacaccaattttcatttcaaactcctatcaatctgtttgtaagccctacttttagtatattgacaatattgtcaatttagatatactgacaaattttttcttcttgataggcattgtcaataagaccaccgccaagacattcatctccatcatagaaaacaactgcttgaccaggtgtgatagcacgttgaggttcatcgaaaataacttctgctttgtcaccgtttaccttgacatctactttactatctggttgacgataacgaaacttagctgtgcaatttagtgtaaacttatctggcatattttgtgtaaaatgaacctgactagctgtcaagctggttgacataagtgcgtcatgatagaaaccttgcccaacgtagagaatattttgagacaaatctttccctacaacaaaccaaggtgcattatctccacctttttgcccaccgattcccatgccgccacgttgaccaatggtatagtacattaatccattatgttctcccatatcacgaccatcaatagtcatcatacgacctttttgagccggcaaatagctactcaaaaactctttaaaattcttttcaccaataaagcatattcctgttgaatcttttttcttagctgttaccaatcctgccttctctgcaatttcacgaactcgcggcttttgcaaatgacctaaaggaaacattaccttttgcagctgttcttgtgataactgacttaaaaaataagtttggtccttgttattatctgctccgcgcaacatatggacagtcccgtctgcatcacgtgacacttgcgcataatgtccagtcgccacataatccgcaccaagggtcatggcataatcaagaaaggctttaaatttaatttccttgttacacatgacatctggattaggtgtgcgtcctgcacgatattctgccaagaaatactcgaagacacgatcccaatactctttttcaaaattgactgaataataaggaatcccaatctgatctgctaccgcagccacatctttgtaatcttctgtagctgtacaaacgccaaattcatctgtgtcgtcccagtttttcatgaagacaccaatcacgtcataaccttgttcttttaaaagcagagccgttacagacgaatcaacaccaccactcatgccaacaacgacacgtgtttttgaattatctgtcattgataatcctcccatcaaatgtaagatacttgtgcataaaatccaacaaaaaaataggaaaataccaaaaaatcaggattttctatagtctttttctgaagacttagctcaagctcaattattttttaacatagacttgaagggtctagttatccaaatatcgatttgaaggtcgattttgaatgcgcatcagcgcaaatcatattataacataaaataaaataccataatatgacaaagcattgataaaaataatattcttcatcttatgaaaatcaaatatcatatattcataagaaaagcaccccatccgttagattttatgtctaacttttggagtgcaaattacaataagtgcttttcctaaattacatgccccaagctgataaaccttgggctttataagcattgatagctgaattaacctgatcttgaactgttgcagttgaaccccaaccaggcattgtttgaaagagacctgaagctcctgaaccattagctgcagtgacttgaccatttgattcccgtgcaataatatattcccaagttgactgagaaaccccagttgctgctgccatttgagccgctgcttctgaaccagttgcaccagcagtgttgccattagcaagattaccattatgattgacattagctacttgagctgcctgagaagcataagctgtattataattgacattatcagttggttcagttgctgcaacctctgttattgcttctgaagaggctgcttctgaaggagcggaggttagttcagcggaagttgtctgttgatcttggcttacttcttgagcttgtgcagtgtgagcaagaacagattctgattttttaatatgtgcttctgtattaactgattcacctgtaaaaaaggaggcaagccctacaaaaaaaggtaaaacccaaaattgacttttcaacatttttctgaatttcgattttttgactctactatacataaaacttaattcctttcattacctcaatttctataatatcgattaaatattactttcattttatttttatattaaaaatattacatcggcatttaaattaaataaaaaatacccaaaatattaaaattttgagtattttgcacctatatctataaaattatttaataccaaccattagcattccagaaagcttgagcagcagtccatgagccataacgacttgatacataagcatctgctacacgttcttgattttcttctgacaaatcaccattcaagtaagaatcactcaattgataacgtccataatattggccatttttagcattataattaccacctgattctttttgagcgatgaattcttttgcagctgcatcagatgtgctcaaaccgctagtattagatgttgtttggttttcttcagctgaagttgctacttcatttgtttggctggtcttggtctcagttggttccactgtcgttgcttcgcttgtctgactagtttccactggagctgaagtcgtcgcctcactcgtttgactggtttcaaccgatactgctgaacttacttcatttgtttggttggcttcagttggcacttcgcttgtctgactggtttcagctggtgctgaagttataacttcacttgtttggctttcttgtaccggtgctgttgtcgtcacttcgctcgtttgactagttttggcagatgctgaggtttctgcttcatttatctgactttcttgtactggcgttgcatcagtatcttctgttgctgcatctaattctaaaatttgaccagcatggataagatggatattattaattttatttaacttagcaagtttatcaacagttgttccgtgtgttgaagcaatctctgataaagtatctcctgatttcacagtataagtagtttctgcctgtaccgccataggtaaaattaaactagctgctgttgcaattcctgcaaaactagctttaattgttgttgttttgttttctaaaatatttttaatagacattggttactcctttaaacaaattatatatacatgatacagtagttatattacttgctttttagagtagtattaaaaatattacaattaagttgtgattagaaaaagtaaatgccttcttttccttttaagaaaaataattccttatttatctgaaaaaattgacttctaatagaatcgaagtattttctcatttttttaataaaaataaaataaaaccaagcaaacaaataccaacaatagctaagctgtctttataagtccattttaataaacggtatttgctacgtcctgcaccaccttgataaccacgcgcttccattgctgttgctaaagcatctgcccttttaaaactagatgcaaaaagcggaattaaaataggaatgatagatttaattttttgtatcaaatttccttcaccaaaatcaacaccgcgtgctctttgagcattcataattcgtgtcatatcatccatcagggttggaacaaatcgtaaacttaatgatagcattaaaccaatttcatgaacaggtacttttaagggttctaaaggttttaaaagtgattcgactgcatctgctaaactgagtggcgttgttgtcaaagttaaaagcgttgaaaaaataatgattaaaacaaaacgcataaaaatcaaagctgcctgcccaataccagaatcagttattttgataatccataaatgaaataaaacatggccattctgtgtaaaaagaacttgaaaaagcgttgtaaagaggattaaaccaatcatcggtctcaatccctttagaaaaaaactaatttttacgcgtgatagaaagaccagaatcatcgtaaagacgaacatcaaaagatttgtaagaacattattagcccaaaaaatgacaataatgaaaataagcattgataacaatttacttctcggatccagtcgatgaacgaaagaatcacctggaatatatcgcccaaggataagattagccattcttaatcgcctccacaaattcctctaaagtaataggtaaagcatcaaaagtcattcctctttctcgcaaatgagcggcaaattgggtaattttaggaactcccaactgtttactttccagaaattcaatttcctgaaaaactgattttggactaccagatagaacaattcgtcccttttctaagacataaacccaatctgcataattagaaacatcatccatcaaatgagtgactaaaacaatagtcattcccccttgatgaagctccttaaacaaggtcattagttcacgccgtcctttaggatcaagtccagcagttggttcatccaaaacgagaatactaggctccattgctaatataccagcaatagctacccgacgcatttgcccaccagataattcaaaaggatttttttcaaatagctcctcagaaatacctaccatagctagtttttctcgtgctaatttttctgcttcttcttttgaaataccaaaattttgtggaccaaaagcaacatcttttaaaactgtttcatcaaaaagttgactttctggaaattgaaagactaaaccaacttttttacgaatatttttaatatctttatttttagagtctgacctaatagcaacatcatcaacaaggactgttccttcagttggtgtattcagtccatttaacaattgcataattgttgatttgccactacccgtatggccaataaaagctgtaaaactgccatctttaatctccaaactaacgttaaaaagggcacgaccttcaaaaggtgttcccgcttgataagtgtaacttacttcttggagattaatgcccataacttatcttccagttccttttctagtaaataacgattatcaaatgtaaagccaatttgtcgcaatgcctttataatagttgaggtaaaagggatgtctaaccctagatctaaaagttcatctcctcgcgaaaagagctctcttggacttgagctagattcaatttgtccgtttttcatcaccaaaacacgatcactaagtgttacctcatccaaatcatgtgtaattgaaatgactgtcataccatattgttcacgaattttttgaatcgttccaattaactctaaacgaccttctggatctaacatactagtggcctcatctaaaatgataatgctgggacgcatagccactgcacccgcaatagccaccctttgcttttgaccccctgataatctagctggttctcgtgttttgaaatcagacatatcaacaagattcaaggcttctacaacgcgttctctcatctcttttaaaggaattcctttattttcaagaccaaaagcaatatcatcttctacagttgccccaacaaattgattgtcaggattttgaaaaaccatactaattttatggcgaatatcccaaacattgtcctctgatagtttgtgaccttctattaaaatttgtcctgattcagcttctaagagtccgtcaattaagcgtactgttgttgatttaccactaccattatggccaataattgataaccattctccatgtttcacgtgaaacgaaatattatttaaggttggtttttcctgattttcatcatagcgaaaagtaacattttttaactcaattattttatctgtcattttttatttaaaagtatccttaaaaagaaagccggctcctttgaagtaatcataacctgaataaagcgtaaagaagagagctatgtaaagcagaatagttcctacaaattcaaaatggcaaagcaataaaataattgaaaacatttgagtagctgttttaatttttcctggcatagcagcagccaaaacttcaccacctgtttcaactaaaagtaaacgtaatcctgttacagctaattcacgacaaataatgatagcagaaatccaagctggcgctaagttaagaccaacaagtatgataaaagcactcatgactaacattttatcagcaagcggatctgcgaatttaccaaaattagtaacaactttccacttacgtgctaagtaaccatccaaatagtcagttaagcttgccacagcaaaaataatggctgcaataatatgccaagtgacactactagtcacagaagttaaaagcaagaagactggaattaataaaattctgattaacgttaataaattagggatattttccttcttagccattcaaaactcctttattggactgtcaaattaatattagtcaaaccagcattaacaaggtttgtagtatccaccttttgaccattgatcgtaatttcaacaccgctaggtgatccgactgtcagcatagatgttgttgaaccttctgctaaagtaacagtataagttttatctgttgctgttagagttgttccagattctccatcagcagtgttagttgctgaaacccaactttcctcatcccctgtcaaagtaaaggtaacctctacttttccattagtattacttaaggtgatattatttccaccatcagcaaagtctgttgttatgctagtctgactttgtgtcgttgaattggcatcatttttagtatccttagattttttcgtagaggtacttaattcggtcttatttgaatcagtttgcagctgattataaaccacatatccaacataactgataatagttaaagcaagtaaaattagcagaattaaagcccatggaaatttctttttcggttcttcaccataatcatatttactaagtcgagatggtattttttctatttttttacttgcctcctctgattcaaccttaaaatcttctatttggggagtctcttctgtaatattttgagtaacatccaaactatcaatagctaactcttgaggttcttcaattgatttttcttcatttttcttttctatattgctatctgaagaagcagccaattctgcagaagaaggtaggataagttcatcgctcatttcctgattgcgataaccatgaataatagaaaccggatctaagccaacagcatgagcatatttttctaaatactcatttgttttgccttctggtaataatttaagttgatctaactccattgccagtatatagtgaggagcaattccagttttatctacaacatcatcaaaactcaattttttttcaatacgagcatcacgtagagtatcacctatcttgttcatatttaccttacctcagttcctttatctatactaatcttgtttattataacaaattttaaatagattttctgtttattttggaaataatgtaaaatcggttagctgcatttcctttgttattttttctccaaattccaatacatcttttatttctatattttgcaaaacagtaggaaaatcaaaataagtttcttctccccataaattatctataaattgactagaaagagcctcaagtgaatctaaactccgaataaaatcaccatatagctctttttttactgtttgtaaatgtgaggcagaaagattggtatctgtcttaaacttcttaattgtttgcccaatcttgttagacattgctattggctctttagtgtcaagcaaaatgacaacaaattgataagaagttgacacttcaatttttaattcaaaagaatcatcaatttttctatcttcataccattgctgatagtgctctgatgtccaaccaaacaaaagtaaaaaaaagagctttaaaagtaatctttcctttatcaaagatttcggttttttcttaataaaattaaagcgaaagcctactgctaactttgaaatagaaatatccatttgcattgaactcgttggagttattggtagtaactttaaaggagaacgtttgagttcaaatttgggcctgtccggtaactgcctttgagtagtaacaacatctttataaacccttttaacatcaaaatctcctgccactaaaagagttaaattttcaggttgataaaaataatgaaaattttcctctaagttattttttgttaatttatcaatactatctctattcccagtaatatcttctgctaaaggggtttgaggataaagtttagataaaataacttggtaaagataatcatcagaatcatcttgatacatattaaattcttgagttatgattttcttttctttttcaattgacatatctgtaaagtttatttgactggtaaactcctgtaataaatctaaatttttcttgatattatcagctgttgaaaagtaataaattgttttatcaaaagttgtgtaagcattgctttctgcacctaattttgtaaattcataagcagcatctttttgtttattaatttcaaataactgatgttctaaaaggtgagcaatacctgctaaataagatttctttttaccattaactgtaaagtttgtgtcaattgatccaaagcgactgctcattacagcaagtgtttccttaaatgattctttaggtatcaaaaaaacagtcataccattttctagttgattatagtaaaattcctcattaatagttggaaattttcgtctctttaatcttgttgctgccaaactactctccttctaaaaaataaatagactgtaacttaatgagattagctgctttgacaatatcgtctttactaactttgtcaattctgtcaatccattctttcagctctaaacatttatctccaaaaacacaatgattataatgcatttcaattctatttttggggttgtcctcaaataattgcatattgtttattaacatcttttttgtttgagctaataaatggcttgaaaaccggcctaattttaaatcattgaattgctttgttatcaactgaaatgcctgttgtcttttgttactgtcaagacctgtgtaaacttgaagtaaacctgtgtaaatatcaaaataacttccaatattataagccaatcttcttttttctcgaacttcagtaaataatttagaatgaggaaaaactcctaaaaggccattaaaaacaagtagggcatagtaattatgatctccataagctataggaaaatgatagcctagttgtaaaagagactgttggttttcttgctgttcaactttttcctgaacaatcttcgaatattcttgttggtaatcaaagatcaatgttttttggcgatcttctaaaggaaattcttcaatagattgtaaaacttgatattcatcgaaatcccccaaaacaaagatatcaatctgatcttcttttaacattttttgaaattcttggtacgttgtataggaattttcagcacttactaactctgcagtagcatattttgaatattttagaacttcatctttaaaaaagagtttttgtaactctaagtgactataataaaaagaatcctctttgtcagattgtaaatatctcattaaattttctttttcaagatcaaaacttttactttgataatgctctactgaaatgagaggtttaaaaagtgccgctcttaagaaatggataatttctcctaagattgactttccttccaaaataaatttatcagatacaaaagaaatgtctatatcaacaatatgaacctttcctttttttgatatacaggtcgaaaactgagcaccatataaattggccaacttttctctaaaagtttgagatgttggataaacattattagcagttaccaacatctgagcaactaaaacacgacgagcaagtgttttactatctaattcaccagaaaaacgaaaggtaatgtgattcgtcttaaattgacttgttttaagcaagtgtaactgcacatcttgggctaatttcataggtcttcctttaattggttattccgttcaattatatcattttatgctataattatcctaagagaaagttgaggaattatggaatataaactctttaatgactacattacattacaagctcttttaaaaaatttgggagttattccaagtggaggagccataaaatcttatttggccaatacggaggtcttatttaatggtcaacctgaaacgcgtcgtggcaaaaaacttcgtctaggagaccaaattagtattccaaatttagatatcattattactattattgaaccttcttcaaaagaaagggaagactacttaaaaaatctggctgaaaaagaacaagtggtagcttttgtcaaaaaactcaacaaaaagaagaaacaacaaagcaaacagaaaacaagtaccaaacctaaaaaaactattaaatttcctggcacttaattatgtggatagaaaaaattaatttaaaacattatcgcaattatacagccattgaatctgaattttcccaaagtcttaatgtttttgtgggacaaaatgctcaaggaaaaaccaatttcctagaggctatttattttttatctttaacccgcagtcatcgaacacgatctgacaaagaacttattcaatttggtcaaaaagaattaaatgtttctggccttcttaatcgtgtcaatggcaaaattcctctggaaatcaacttatctaataaaggccgaacaacaaaaataaattatctcaaacaacctaaactttcagactatattggaacaatgactgttgttctctttgctccagaagatcttcaactaataaaaggctccccaagtctcagaagaaagtttattgacattgatttaggacaaatcaagcctatttacttatctgatttatcaaattataatcatgttcttaaacaacgaaatgcctatttaaaatcagagaagaaggttgatactgattttcttttcgttctagatgaacaattggtagattatggtagtaaggttattgagcatcgccttgattttattcaaaatttaactaaagaagctgataaatatcatttctctatttcaaatcaacaggaacatttaaaaatttcctacctttcttctgttaaatttgatcataaaaaaaatattcgtgataactttttaaacctgctacaaaaaaatcggcagggtgatattttcaaaaagaacaccagtgttggtccgcaccgcgatgatttagcctttttcatcaatcaaatgaacgctaactttggtagtcaaggacaacatcgcagccttattttatctttaaagctggctgagattgaacttacaaaaacagtcactggggattatcctattctcttgttagatgatgtcatgagtgaacttgataattatagacaaatcaaacttttagaaggcatcaaagataatgttcagacctttataacaacaactagccttgaacatcttcaacaactccctaagaaactaaagttatttactatcaaccaaggaaaagtgctatcagaatagttgtaaaactactgtcaacgtcttttactctatagtaaaagattttgtcaatcaatagctcttaagacttttaaataagctatctcttaataaagatattgtaaatgtattcttgacagtaaaaaaactaaaacaaaattgttttagtttttttacttaaaatcattgtacagaataatttggagcttcattagttatttgaacatcatgagggtgactttcaatcaaaccagcacctgacatttcaataaattgagcattttcatgaagttctttaagattagctgcaccaacataacccataccagagcgaatgccaccaagcatttgaaaaacaatatcagctgcagctcccttataagctacacgcccttcaataccttctggaacaagtttattagcttcattaacagacccttggaagtagcgatcgcttgatcctttcttcatagctgcaattgatcccataccacgataagttttaaatttacgaccttgaaagatttctgtttcacctggagcttcatcagtaccagcgaacattgaaccaagcatcacagcatttccacctgcagcaagggctttaacaatatcacctgaatacttgataccaccatcagcaatgatcgttcgtccatattcacgcgcaatactggctgcatcataaatagctgtaatttgaggaacaccaacaccagcaactacacgtgttgtacaaattgaaccaggtccaatacccaccttaacgacatcaacacctgcttcataaagggcacgtgctccttcagcagtcgcaatattgccagcaatcaaggtacgatctggaaaatgagctctaatttcagcaatcttacgaagtacacctgcagaatgtccatgagcggtatcaataacgatagcatctgctccagcttcaaagagagcttcagcacgttcaaaagtatctgatgtgacaccaaccgcaccagcaactagaaggcggccaaattcatcttttgctgcatttggaaattcaataactttttcgatatctttgatagtaatgagaccagataaacgacctttttcatcaatcaaaggtaatttttcaatacggtgctcatgtaagatacgttcagctgtttcaagatctgttcccacaggagctgtgaccaacttttcactagtcatatgttctgaaataggggtttcatagtcagaaataaaacgcatatcacgattggtaataattccaattaacttacgattatcaagggtttcaacgaccggaacaccactaatacgataacgctgcatcaattcttcggcttcagacaccttatgctctggtgtcaaaaagaaaggatcaataataacaccattttctgagcgttttacttttcgaacttcttcagcttgttctttgattgacatatttttatgaacaacaccaagaccacctgcacgcgcaatagcaatagccatcttactatcagtaacagtatccatagctgcagtaataattggaatattcaatgtcaaatttttcgctaattttgtttgcatactgacttcgtttggaagaacatggctttcagccggaataagcaatacatcatcaaaagtataaccttttttcaaaaatttggtgtcccaatttgacattaaaataatcctcttttctatacattttgcctactggcctttttattgttactataataacacgctaaaatcatttgtcaatgaattctagaaaatttcaaaaaagaacagaagttaattaacattagtcttctgttctcccccaaatggtctattctaaaaataattaattcccatagcccttttaactccacttaaggtttctgaagctgtttcacgtgctgtttcactacctttttttaaaatatcaaaaacttgatccatatttttttcatactccagacggagtctacgtattggtgttaattctcgttcaagaatatctaaaagataatgtttggtcttaacatctccaagtccaccactttgataatgttctttcatagctgcaatatccgtttggtcttctttacgtccaaaaatatcaagatagtgaaaaaccatatttccttcaatttggcctggatcttcaacacgaatatgatttggatctgtgtacatgctcatcactttcttacgaacggtatcagcgtcatcagaaagaaaaataccattaccaagtgatttcgacatctttgcattaccatctaaacctggtaaacgaccagctgcctcatttttaggataaataccttctggttctactaaacaatttgttttataagtatgattaaagctacgcacaatttcacgcgtttgttcaatcatgggtttttggtcattgccaacaggtacataatttgctttaaaagctgtaatatcagccgcttgagaaataggataaactaaaaatcctgttggaatagattcgccaaatcctttttgagcaatttcagttttaacagttggattgcgttccaaacgagccaatgatactaaattcatataatacatggtcaattcagctaattccggaatttgactttggataaaaatagtgaccttttcagggtcaagacctactgacaaataatcaagagcaacatttgcaatagaatctttaataatttctgattctttagcatgatctgtgagagcttgttgatctgctaaaaaaacaaacatttcatatttattttcattttgtaaaaggacacgatttttaagactaccaacatagtgacccaaatgtaatttccctgttggtcgatctcctgttaaaataataggttttgacatatttgttctctcctagaaatacgattacttcattataacacaattcttaacatcaaacagaacaaacaaaattaataagtttgagataagcatacatattgtcctgcaaccacttacaaatacctacatcttttttttaaaattacataagcacaattaactatgctaagtagaattctcttggtctctttgtcaaacaatacgataacgtcagcagtaccagtatcctaaaaacatgtcaatttctaatcaacttttgaaggatgaactaatcttaactaagtggataatttttaactgacctttgaaataagatagtaaaaaataatcatgtttaagttctgttcttatcctatagataacttaggtaactgtttgaaaaatcaagggttttcttgtaaaatgaaagagtattaaaagatgaggtggaaaattgctaactgtatcagatatttcgctgcgtttcagtgatcgtaaactttttgataatgtcaatattaaatttacagcgggaaatacttatgggttgattggtgctaatggtgctggaaaatcaactttcttaaaaatcctatcaggtgatattgaacctaccacaggccatgtttctcttggtccagatgaacgcttatctattttacgtcaaaatcattttgattacgaagaagaacgcgctattgatgttgttattatgggcaatcaagatctctataacatcatgaaagaaaaagatgctatctatatgaaacctgatttttcagatgaggatggtgttcgcgccgctgaacttgaaggtcagtttgcggaattaaatggctgggaagctgaaagtgaagcttctcagctcttgcaaaatttgaatattcctgaagaacttcactatcaaaacatgagtgagctcactaacggtgataaagttaaagtgttacttgctaaagcactttttggtaaaccagatgttcttttactagatgaacctaccaatggtttagatatccaatctatcaattggttagaggatttcttaatagactttgaaaatactgttattgtagtctctcacgaccgccattttctcaataaagtctgtactcatatggctgatctagattttggaaaaattaaactctatgtgggtaattatgatttttggaaagaatcttctgaactagcagcaaaacttcaagctgaccgtaatgctaaagcagaagaaaaaatcaaagaattacaagaatttgttgcccgcttttcagccaatgcttctaaatcaaaacaagcaacttctcgtaaaaaaatgcttgataaaattgagttagaagaaattgtaccttcaagccgtaagtatccctttattaagtttcaagcggaacgtgaaattggaaatgatcttttatcagtagaaaatctttcagttaaaattgatggtgaaagcattcttgacaatatcagttttactttaaatcctggagataaaactgctattattgcccaaaatgatatccagtcaacagctcttattcgtgcacttatgggagatattgactatgaaggtaccattaaatggggtgttacaacaagtcaatcctatcttcctaaagacaatacaaatgattttgcgagtggagaatctattcttgaatggatccgtcagtttgcaaacaaagaagatgatgataatacttttcttcgtgggttcttgggtcgtatgcttttttctggtgatgaagttaacaagtctgtcagtgtcctatcaggtggcgaaaaagtgcgtgtgatgttagctaaacttatgatcctcaagtccaatgtactggtactcgacgatccaactaatcacttagacttagagtctatctcaagcttaaatgatgggcttaaagatttcaaagaatctattatttttgctagccatgatcatgaatttatccaaacattagcaaatcatattttggttatctctaaaaatggtgtcattgatcgtattgatgagacttatgatgaatttcttgaaaatgaagaagttcaggctaaagtagcacaactctggcaataaaaagcggaaacgctttttatttttacattttaaattgctatgaaaatttttataaaaaaacaccaacaaagtattctttactatagtcttagttttctgctaccaagttttataatgtttctcgttctattctccaaaaatatttattgggggagtagcacaactattttagctagtgatggttttcatcaatatgtgatttttgatgctctttttcgtaatattctccatggaacggatagtttgttttactcttttaaggctgggcttggttttaatatttttgctctgacaagttattacttgggaagttttttaacaccttttacttacttttttaatgtaaaaaatatggcagatgctttttatctcttcactttaatcaaatttggtctaataggtttatctgctttttacagtcttgggcaaatttatactaaaatctctaaatcactcgttttgatgctgtcaacatcttatgctttaatgagctttactagcagtcagttagaattaaacaattggttagatgtttttatcctgctaccacttattatgcttggtttacagcgtttagtagaaaaaagggggatttttctttattttctaactcttacttgtttatttattcaaaattactattttggtttcatgacagctattttcttaactctttggttttttacgcaagtctcgtgggatattagaaacagaatgaaacgattaggtgattttgtgctcgtatcaatctttgcaacgctgacaagtgcttttatgctgcttccaacatttcttgatttaaagagccatggtgaagtattaacagaacaaattagtctattttcatcagacatttggtatttcgatttttttgctaaaagtcttcttggtagttatgatacgacaaaatatggctctattccaacgatttatatcggtttacttcccttgatttttgccattacttttttctttgttaaatctataaaatggcaagttaaagtagcttattttcttttattggctattattattgcaagttttatctttcaaccacttgatttattttggcaaggaatgcattcacctaatatgtttttgcatcgttattcttgggctttctccttagttattgtcataatggcagctgaaacgttaactcggataaaggatataaaattgaaaaatttttatccagcctttaccttcttgggagtaggatttttagcaacttttttattcaaggactattataattatctgacacaagttaattttatattaacaactatctttttagttagttattttattattctttttactttttttaatcaattagtttcttataaagttattatttcctttacacttatctttacaagttttgaaatagctttaaatactttttatcaaattgaaggtattcaaactgactggaatttcccttcaagagaggtttatgaagatgatgtaaaggaaattgacaactatgttaagaaaactaaaaaagataacttagaattttttcgaacagaaaaacaaattccccaaacttacaatgatggtatgaaatttaattataatagcatttctcagttctcatctgtcaaaaataacttatcagcacaattattgaattctctaggctactattcacaaggaaatcattctaccattagttattctaataatactattttgatggatagtcttttttcaattaaatacaatattagtaatcaaaatcctcataaatttggatttcatttaaaacagaaaaacaataagctgcaactttacaaaaacttctattctcttcctttagcacttatgtcaaatcatatttacaaagatgtcaagtttgattcttatccccttgataatcaacaaaaatttgttaatgaattgacagatctaaatcttacacttttcaaagaaatccctattatttcaagtgtcggaatgcaagttttagataatcgtgttactattaatggttcaaaaggaaataaggcacaagtttactatactgtaaagtgtcctgcaaatagtcaactttatatcagccttcctaacttgacagttaataataaagacgaaaatgtctttataacaactaacaagcacacaagttcttatatcatagacgaaagttattatctttttaatttaggaaattataaaaaaactcaaacattaatatttaagcttagttttccaaaaaataaaacagttagttatgatttaccacatatttatgctctcaatttaaatgcctatcaaaaaagtataaagcaattaaaaagtcaaactgttaaaacaacaactaagaaaaataaaatttttactacctatgttgccaaaaagagaacttccttgatttacactttaccatatgataaaggttggtttgctaaacaaaatggaaaagcaattaaaatatctaaagcacaaaatggactaatgaaaattgatgtttctaaaggtagtgggaagattataatgacttttgtgccccaaggactatatcaaggaattcttcttacctgtctaggtatctttctctttgtattttaccaactttattacaaaaaatttaatttaaaataattgatcagaatataaataagacctctcatactttataaaacagtcaattttacaaaaagaggaaacaatagaactcttagaagtattgatgtatcagtatttctaggagttttttatcttgaaaagaaaaaagattgaagaaaagatccaatggatcttttcttcaatctaaaatcccatattattacgagattagtgtcttatcactccggcagtaggactcgaacctacgacatcatgattaacagtcatgcgctactaccaactgagctatgccggaatatatagtccgtacgggattcgaacccgtgttaccgccgtgaaaaggcggtgtcttaaccccttgaccaacggaccatagatgtctcatcaacactcttattattataacaaatatcttttatttgtctagctttttttcaaaaaattataataatatttgtctgcttttttaaataaatttcaatttatcctccttcaaaagcagaagggtagaagtaagatatttctataacataatgggtaataaacatcttatttactttttatacttttagtgggaaactctagcatgtcagactaacttgttttttagttatacttttatttataacaggacataataaaagtaactcaaggttctttaaaataggattgacagtcatctatgaattttgttagaataatagagttatgaggtctcatagctcagctggatagagcattcgccttctaagcgaacggtcgcaggttcgaatcctgctgggatcaaagaagtcttttagtctcatctaaagggcttcttctttatttaaaaaataaattaaggctaacataggcaaaagtaaaaaatataaactacttttgattaaataacggcacataacagttgatagtaaaacgcctatcataaacataataatagccataaaaatataaaaagcctgctttctaatctgctcatttttttctacactacccttaagaaaaagataagcagcattttttatatttccagtcatcatagtattagtataaggataacctctgactcttttgaaggttgctagttgaatagaagcgaaaaaggctaatcccgcaatcgtaaaaatagagggtaaaatcggactaaaaatagctataacagataataaaataaataatacataagtacttgatttatgccaccttaaatttttaggtgtaatccactttctaagaaaatagtagaaaaattgtcctaaaataaagaaaataatcggaataaaaaaactaaaagcttctttaaaatgaccatctgcaaatttcatcatcatatacagaagatttccagtttgcatgctagcaaagcgcccgccttgtgtaataaatgtataagcatcaataaaaccactcataaaagttagaagcatagctactcttaaaccttcaaaattttgataatcttttgtcataatttccccttttgtttcacgtgaaactttttaaagatatttattagtttcacaagcaaataagcgatttatctcatatttatgagtcttaatacttaataaatgttgaatccaatcatcaattaaaatatcatagtaaagaccaatcaatagctcttttataaccaattgctagtcaattactaaacggcgtaatcaaaaatcagcctcttaaaaatcattttaacatgattttttcactttagggtaattcacaattaatatcagcttttataaacttttctaaaccataatactaatgctgtttgaaaagtttgataatttcagaatgatcccttttcccttatttatggtaaggacttccctcttgaatcataaaggctcgataaatttgttctacaaaaacaagacgcattaactgatgaggaagagttaataagccaaagctcattaatatagaagctctttttttaacttcctgtgataatcctaaactccctccaataacgaaggtcaaatcagaatatcccttcaacattgtagcagataaaagttggctaaatttctcagaagaaaattgcttcccttctattgctaaaacaataacaaactcacgattagaaatcttattaagaattcgctgaccctctttttcaagaatataagtattttgagattgactagcattatttggaattttctcatcgggtaattcttccagttcaaatttagtaaaacgctttagacgtttacaatattcagcaatcccatctttcagatatttttcctttaatttaccaactgtgattaatttgactttcatataatttattataacatcttttttaatatacttttccacagttttttaaatcataaatttttctaaaaaatacttctttgtaaatagcaatcaacattttctgaaagttttccacaacttgtggattctttcttttttaattattttaaggtataattaagtcaaattacttagactagtcattataaattttggaggctttaaagtgaataatacgaaatctcacccttttttaaaatggtttataccttttttagttatttttttaacttttattttaggggtcatatcaacacttacctttaattggataactggtaacaaatcgttttctaacaatggaaaaacaactgttagtaatgtcatttatgataccaaatctaacactaccaaggctgttaaaaatgtcaaaaatacagttgtatctgtcatcaattatcaaaaaacagataatagttattacaattatgacagcggttctcaagaaaaaaataaatcagaggatggtctaggagtctacggtgaaggttctggtgttatctacaaaaaagatggcgatagtgcttatttagtcacaaacaatcatgtcgttaaagatgcagaaaagttagaaatcatgatggctaatggtaaaaaagttgtcggtaaattagtaggttctgatacttattctgatctggctgttattaaaatttcttctaagtatgttacgacagttgctgaatttgctaattcggataaaataaaagttggagaaccagcaatcgctattggtagccctttaggcagtgattatgctaattctgtaacagaaggaattgtttcaagtctcagtcgtacagtaacttcacaaaatgaaaatggcgaaacaatttcaactaatgctattcaaacagacgcagctattaaccctggtaattctggtggcgctttaattaatatcaaaggacaagttattggtatcaattcaagtaaaattgcatcaagtaataactcaaatagtggcgttgctgttgaaggaatgggctttgcaattccttcaaacgatgttgtctctattattaatcaattagaagaaaatggtgaagttgttagacccgctcttggtatttcaatggctaatcttagtgaagcttcaacaagtggaagagatactttaaaaataccaagtgatgtcacaagcggtattgttgttctttcaacacaaagtggtatgccagcagatgggaagctaaagaaatatgatgtcattacagaaattgatgggaagaaggtagcgtctatcagcgatcttcaaagtattctttacaaacacaaaaagggagataaaattaaactcactttctatcgcgaaaaagataaacaaacagttgagatccaattaactaaaacaagtcaagatttgaatcattaagaatggacaactatacaatacaacaataagtctgggacaaccataatcccagtcttatttttagataaaacagcagctctttataaatgataactgatagtcaatacaaatcaaatagattaagacgtagaaaagttaatgggttctaagcgccacattaaccagtgacagctagtatagatgttctgcctagccacaacagtactagttcgttgtcaaaacatactgatctactgatctcgtcctccataacatcacaactatctacaatttacaaaacaatacttggagtacggcaagttcaaaaagtccgagaaattctttgagatgaaatatgaagacaacttcgttgacttttagtattaagcagataatagagataacctaaatgtctctaaccaactgtgaaggggcgggataatttatctaagtgaaggatttttatcccacctcttctatttttattattggagtaaatgatgactgaacaattaaaatatcttaatactaaagatattaatccaaatccctatcaacctcgactgcaatttaaaactaaagaattggaagagttagcacaatctattaaagaaaatggcttaattcaacccattattgttcgaaaatctgatatttttggctacgatttggttgcaggagaaaggcgcttaaaagcagcaaaattagctggattaaataagattcctgttattatcaaaaaaatttctgatgatgacagtatgaagcaagctattatcgaaaatttacaacgttctgatcttaatcctattgaagaagccaaagcttaccaaaatctcattaatagaaatcatatgactcatgatgatattgctaaagtaattggaaaatcaagaccatatattactaacagtatcagattgttaaatcttcctctacacatcagccaagctcttgaaaaaggtctaatttctcaaggacacgcacgacttcttttaagtatagaaaagcaagacttacaagataaatggttccaaaaaattcttactgaacagttaagtgtgcatcaaattgaaagagcacttaaaagtcaaacaaagaaagaaaaagaaccttcaaaagacatttttctggcagaaaaagaaaaagagctaagtcaatcattaggcttacctgttgttattcattataataaaaaacatcaaggtcaacttaaaatttccttttcgtccgaagaagacttcaacagattaatgaacaagttaaactagcttgttcattttgtttttgtttttaaccacttttccacaagaaaagatgctatcgaatctcttgattaacagaatttatcatcttttccacaaattgtggaaaacttatatccacattgtggactcatcttttttaacctgtggaaaactttctcaatttatggtaaaattttcttattacaatcttgataggagtacact
